United States Patent Application Publication US 2019/0183130 A1 - sequence listing, part 17

SEQ ID NO: 2 - DNA, 21303856 bp, Cryptococcus oierenis (residues 11,620,291-13,557,005 of 21,303,856)
ttcctgatcttctcttgctagactcttttcctctgtgagtcccttgttgacggttccgaagatcctctcgtgtagactgagtcctgcagtctttacgccgttgctcttagggtccgacggcgtaaagggcggggttaggggtgatctatcacgtctgtcctggtatgatcggggggaaggcgatctgcgtctccttatagggctaggggaacgaggtcggtatatcctcggacctggcgatcttgagcgtggaggaagagatggtccgcgattgctctcggtatgtctctcgttccggagctctcgtcctcgacgatatcgatcctcgtgtgcttgatctcctctagggttgacggacccgtatctggaatcctgcctcggtaaacttggtaaactaggaccttcgcctcgtctatatctctccagctcctgatcgagctctctcaagcggctctccttgtctctcgattcaatgggtactcgtctgtccagaggtgctggtggtggggagggggaacgtctgccggcgtatcggcgggacaatgaaggtgaataagatctctccctatgacggtcgggtgaccttgatctagatctagacctcgacctcggtcgaaagttggctggtcggcgagaagcggatgtggatgcgacgggcgctcggggggcagcagggtcaagcctgagcgacgctgatggtcgtgcggggaggctcggtggtgctggtaacgccttgttggaaagcgtagatttcacaggaggaaatgcctgacgctgctgttgctgtgtttgttccgttcgttgggaatcggatgtatgaccgtttcgttccggggatgttctagcttgtctatattcagaatggtttccaacgccggacatggattgtgtttaagagatcagggctatcgtgtaggcgttccgatcaggtccgctaccgagttttgagatggagaaaagaagaatgcgatgggattgcgaaacgcctagggtttggaattatggaagatctcaaaccagagattcaagcccaggatttcctgtgcagcgagcgaaatgccaaattcaatgccttagaagaggtcgcgtagcgtacgagcaactcgattctattcaccgaacgaaacctgctatggagtgatgatgtacaccgcttgatctgtggtcgtagcgatgaccttgaagctgcgatgtttataggtattgtgggctttcaaactcgtgtggggaacctcgagttcgagacctagaccaaggtagctagctgttggtggtcgatgggaattagacttttgagcgtagactactagacgttggacaatcgtttggaactttgagaggaggatcaactcaggtcaggtaagttcatctcatacagtcgtctacttgaaccatgtcatcgacacatcatctagcagtacctgaccagtctaaggtcattgcgatatagtctgaatacttcatcgccatccctgaaaagtccagaccccaggcgatccgctcggggacaccacaccaacttgtaggaaacagcaaaagaggaaagatcccggaaaaaatgagctttgtacgatccgtctttgcgccggccgtgagggtgagttttcatgataccatgtcaccatgctcgggtaattctagacgtgtctccttgaacaacttgactgacgaaataattgtgtgcgacgttccctcgctgtacagctctcgcgaacacctcgtctcgtctcgcgaacgctcgctacccaagctcccttcccccccgcatccacctcgacatctggcatcgcctcctctaccccagaaggtagcacgatcaacggcactcagtctgttttccctggaggagatgtcgatgtgacggatagcgttttgaagatgctcgagagcgaggatggtgagccgcgatctgcacccctccggtcgatcacgatcgatcagttcacggcaggaagtcgagagctcatcatttccgaatcgtcgtgttgatatctctgcaggtctctcgggagaggccgaatccatgtcccggcctatcagctaccttcccatctcgtcgttggcctcactaaacccaacgcttcctagccctcaggtgagccttccaatcccgtcccgtccctctatctctattcaacagaacctagactgactggaccgtcacaaccccctctacaactcccaggaactcgctgtaccccttcctcctaccgtgttcgctcaaccgttgaggcgagatatcctgcacagatgttccgtctactacctggccaacatgcgacaagtacgtcttgcagccagatcgattctgggcgggtacattgaattgacacgacctttcctggatcatcgttacagggagcgggatcgagcaagacccgagcagaggtggcgtattcgggacgaaagctgtacaggcaaaagggaaccggaaaggctcgtgcgggtagcgccggtagtggaacccgtgagttctcccttggtcccgcaacgatagcgaccacgttctctgacgtcgagctttgctcttgcggatcacctgcgcaggtcgaggcggaggtacgatccacggacctcatccccgagactttacccaactcttgcctcgtaaagtccgtcaactcggtctgcacgtcgccctctcttccaagctcttgagcgggttgttgaggatcgtcaacgatctcggcgaggcgcagtggaccaagactcgacatgccgtcgccgcgttggccgacgacaaggccggggagcgtgattcgctttacgaggccgacgaacaagactcctcgttttcgtcctcggaacgtcaagtccgattcggacatccggaagacctgtcgatcctgttcatcgcgggcccgccggggacggaaaaggagtttgacgacttgatcgggatggtccgttgtgtgaccaacgtgcccaaggtcgaggtcgtccccgtcgaagaggtcgaagcttacgaggttttgaggcggaaatgggtagtaatggatgtcagggcgctcgagtggttgggtgaacgtgcgggggaaggatgggtcggtgaggagggagaggcggagagggaggaggccgggatcgagggtctggtcgagcccgaattggcaagcgagggagatggccgaccgacggtggcttgatcgggagcggttgtgcgagtttgacggtggatgtatatacgatgacgagactcgccctggatgggggaaatgaacagcacgatgtggtatcgttgccgtacaccgtacaagtagccagagagactgcaccaaataatggctacccgtaattgtatgttacactttatgtcgtcgatcgaaacgaccatgagcacgaggcatgatgtcggttgtcttgcctcgattccgagtgagctgattcccgatctactgtcctctcgcattcgtagagtagttggtcccaagtagtgggtggtgagcggtagcaggttcgctgtgtggtcctctgcgaggcacagagtgagtgtattcgggattcacggcttgatccgacgcgcgcgaccctcacccctctcggcctctcgcccatcgcccatcgcccatcgcccatcgccgtgtctctcaattcgtaatctaatgtcacctggcaccctggctatcaacgaggaattcggaacatctcgacggacctttgctctcggccaattgtcgatataggaatccttcatacgaataaggtcaggtggggccaggtatcatgaggacgaccgtagaccaagaagaagaagaagaagattctcctgggcgatggacaagtcatccaccatgcgagtcggctcgcagaaacatcatcatcatcgtcgagtgacataacaaactcccgacaaacagtaccagtctgataggattgttacgactaccataacctcttcacgtcgcatacctcttctgatcacctgatcaaaaacaacactcgatcaccagtccggatagaaagcagatgggtacccccggggcgaccaagcaaatgtcgcagatcgacctctcgacaacgatggtctatatccaggacgtcgaacgggacgcaggatcttccacatcaacccatcgaatggaatgcgagtgtgagtctctgatcatgatatgatccacgccccctggatgaccgttgacgatggacaagaccatcactccgcgtctatagctgccgactcgaggggaccatctcgtccgcccacctgtccggcatcaaaggagacgtgcgaggtggcggacgtgacggaagacggaccgtgtcttcccacccgaacgccgttttttaggcagacgatcgcctccgataacctcctccttccactcttcatcgtgacctttacgacgggcctgctcgacgcctcgaccttttcctcgttcaacgtattcgcctcgaatcagacggggaacgccatcctcctcaccctggccgctgccaactcggctcccgtcgagttgcacaacactgcggcttcgttgggagggttcttgctgtgcggtctcctcgccgggaaactgggcaacctcctgggtacccggaacagactttggttactcctgagcaatctcgtccaactcgtcatcctcctcacgacgaccatcctctcttcccccgccctcgctgtcctccccgcgcaacatcgggcatcccaatggatcaccttgctcttgctcgcctcttccgcggggttccaagtcgccatggccaagacgagcggggtgcaagaggtacccacggcgatgctcacgagcccgttcatcgagttcgccacggacaagtcgttgtacaaaggatggagagctggcaaatgcgtcaagagtcgcaataggagggcggtttatatctcgtgcttgatgggtggaagtctgatgtgagtctctcgtatcggggtcgaggtcgaggtcgaggtcgaggtccggccctgggtcacaggtcgagatcccaacaggcggctgactttagtcgtcctgggttactatagtggagcgtacatgcatcgatacacgggcggggctacggccgtcttgatcctggctacatgcttgaagttcatcacgacggtccagatggctgttttgccaggatcggaacccgagcggccgcatgactgagtgggatcgcaagggagcgtcaaggtcgtaaacaagttgtatcgttatcacaaagtttgacactagtatggcatagatgtctcgtcgttatgtgaccttttctccgtcatacccagcctcaaggcggctgactcccgggctctgccgtggtcgagactgtagcgaatggtggattaggatcgtcgccaaggggtaaagcatcgccgtcgcgcagggctagaaagacaggtgacctgcctgccgttcacttctatttccacagcatcaacttcaagcttagtattcacggacagcgaaactccttgaccggtcaaagaaggacaagatgaaacagaagggacgcatatcgatcgacttgaagccctctgcgagactaatccaatcagaagcgcgccttacttagcgcgcggttccgagattgagcggcagccaaccggcaagtcgacatgtctctagggctgtcagatcattgctgacctcaaagataccttgacctcgactggcgtactttattcacactctgtactctccacgaacccacactcgctacttttccccagactaaattctattacgaacaaaaagcacaatgttccctgctatcaacgtcgcccgagtcggtctccgagccaccccccgcgccgcccgggtccaggtctctgccaaccagatggttgccaggcgatggttgaacgacaacgccggtaacaggactgacgacaaggccaagttggtgcgtaacaattcgggtcgttgctagctcactccacacggctacctgacggaatatcaagctgacctattgtttcgggaatatgcggcgttgcgtgtttgtcttttgattacaggctttccgattcggaatgaagggtaggtcggcggcatgtgatatcgcagcgagtatcgaaattgacagttagatactgaatcatcccagatatccccgtcgagctctaccccatgttggtctgtgtcgtcgccgcttgtgtcggtggaggttacgctcttgctcgtcaacgtatgttttccggatggcgactcgaggaccgtgaagcgtcaggactgacactgttcttcgtgttacccctgcttctcttcctaccatgccactaattcctcgctgcctgtcaaactccgacccgaacttgtctcgcacagtctacaaggacggttccgacgtaagtctcgcgtcgaccgcatcaatcgtcgctggcacggcgtgctcatcctactcccatcactttacagctccgaatgcttcccaactctttcaggaaggctgcttcttcctcttcttcgcactagatgtgacgacaggggtgtacggtgtatcctgatggggaaaagaggctttgtatcgctccggacagtgcgggaagcgggatggcggcttggttatatccatttgatgcagctagaagcgggtgtggggttacaacatgagagagaggaacggcggcgatatacaaccgaaacgaaatctagccgagacgatccgggggatagagctactcccctcttggcgaccctactcgctgaaccgtctcgcccactctctccctcagactcccgaaaaagttcctcgcgccgtcccgcagaccatctatctggaagctggccccgatgtcgttcgagttggctccgctcgctcggtacaagcccgaaccagcggcaccaccgacagaaatttcgtagcctccagcacgcaagttgatacccgaattgttattgggtaccggagcagaagagctagccgcgatggactcctgagtggggtatgggttgcttgcgagcgatgcggcgttggcgactccgctaggtgcggcataaacgctgggcgagtggtgcaaggccgaatcgctcatcatctcgaggaaagatttcgagttgtgtacgctggttcctgcgagcaacattcgggcctgccccgccagctgctggttcaacaaggcaaccgcccgagactcttcatacgttgttcctccgagcatgaaaaggatgatgtcttggggacgctgagtcctggcgtgttcgtcgccttctacgaaagggtaactggtttcccggagtcgccccttgagcaatagatccagcgtttgacagagatgcggtgtgtgttgggtataaacattttcgaccccctgcgagtgatcgagatcggctcgaattgtgaaatagaaatcgtgtatcgtgtcgacataccttgagtcccttgagcgcgctctttcccctcgaaaagatgttttcgttcatgaagaggtcgtcctgtcgctggtctgctccggccatgttcagcatgacgtagacgagctggtcagattgttcaggatcagtatcgggtaaatacggggtaccggtcagttcggctcaccctggctttgtccgccgagacgccgttttgtatcagggcgtccactacaccagcaatcgagttgcctgaaaacttctggtaccttaatgcgtacaagatggcgagtcgcagcttgttactgttgggcgtcttgggagatgatagaagctcgaggacgctctgcaagtcgatgaatgttcagctagagcagatggtcttcggatagacgttcgaaccgaccttgagatcggcggcatgactctcattgcttgccaaactttgttccacctcgctaattgctagcagatcgtccctctcggtaaccttgctcaattcgccgaccagggcgacgtgttttgacacgttgccgcccagctttttaaattcgggatactcctcgacgaatcgccgcatgtcagccagtgtctctatcgattgcggattcgtgatcgcctgtgtcttggactggtaggactgaacgtatgacgacagggcagcacccagatcaccaaagtttgagaatagctgttcagcgtagaagggatccgacgaggacgacaggaccaagtcctatgcggaaggagacaaggtaccgatcagatccagcctttgaataagctctttggtctgtccccccaccttcaagtcggtcctggattcggaatcgattgtgacccggccgttatgaatgcccacaagctcatgtaccattgcttgatacgtccattgggttaaaagcggggtgaccgggtcatttctccgatctgcaagcgaaaccagcgttagcaaacgtgatgtagggacctgctacctcgactggaactcgcctagaatgagcaacaacggcgaagaccctgttgtgggccggaaaccgaagagctctcggtatggaggttgattcatggcggcctacagtgatccgaccttgtcaacggcatgatcgatgacaggccgaagctttgctcacgttcacgtcctgagccaactttttcccacccgagctcatcttttcccatcgtatcacaggtttctttttcaagctcagcagaagagagaggatcgtttgtgtatgatgcgtcaatgtcggtggaggaatagacaagggttgagggagatagacagggggctgacgagtcgtgtcacgccagtcataagcgatatcgtccctggtgtgcattccgtactacctacatttggtggatcatcgatcccgtccgcaagtagcgccgtactcatcgtgaccaagctcggatagtgggggaggtagtctgcaaagtattcctggcgagcatgagcatgatcgaggttaggtccgtctcgcttgttcccccgccgcgctggatcttgggagtctgctcacctgaacttccttgaccacctcaaactcgtcggctgttgccatgtcctctatctggcccttggtcaagacgctcgaaaaatctaccagctcgcagtgatcaatacgagcttcatgtggcataattccccggtgactcacacagccagtaacctccataccggggcccatcttgcggcggtccaccgggtgccacgtcgttcccagtcaactcccgcttgactgcttcaatgctctctctacatgggcgaaggaaagagatgcaggacagatgaggcaatgcttgtcggttcggactagcgataatgacacaacgttagcatcgaggtccggcacgtcatggcttccattgcggacttgcttatctatccgatctatcaagtagacttcgtgctgcagcagatctgtttgcgtcatggccaacgatacgatcggtgtctaacgagaagttccagacgctatcagctcgtatacagacaaaggcgcttgcaggcgtgggatcggggaccaaccgtatgagcgtccatgagcaacaccttcatcccgctgacctcgtccaacatcttggtgatgtacgtctgtacagctttgagcgcgtccatctctcgagttgccggatatggcccgaatgtttagaggatgatgggatcagggtccaacgacctctgggaccggacaggatagcagcaaagtagagctaccaagtcgaatccatgcggcaaatgcgagtcgaaccggttgttttgtttgtgtcggcctgacagtctagatccttgatccaaggtgagttgtcccgaaaaaggttgctgatacgatgcagattccacccttgatggataaattattcgagctcctgcaattgactcgtcgactttcgacaggatcggtcgccctcgaactgaacggtcgaggttgaatgatacaccacctatctcgctcgcaagctcgcaagtcgtcatcatcccacccccgcgggcgatcgcgtgtccccggtttcgcgcgacaatcttcttcttgagccgaggaggtttgggtttcagtgcacaaagcatcgtgacaacaacgtcttagcaagtggcaacggttcagcaaccagcagggaggtcagggttatgttatccagtcgacagtcctagacccatcctttgcatttgggtatgtcgatatttcgggaaggaattgtaatttgggcttcacatacgttcaggacgtgatcgatctatcaaagtctgaagatgcaatgatctcgatgatgccccctgagcagctggccaggttctgtaccatacattgctccaagcgctgtctcccgcctgtcaaccacgccttgaatacatcccacgcaagcaaagccgagtgatgcagtgccgtcctggactagtgggatgctctgcctcgatcgctcatccacccggctgatcatggctcctgttggagagcaagtaatctatgtgggaacgtcgaccagagcggatgtgacaagatggccaatatctgcttgtcttctctggcctgttgacagtgtccagaagcttcaaatttgcgattatgattccgcttcgcgatcacagcttttcatatcgagctcgtactgcagcctatgacgactgagtcaggaataccatccgcatgtgatcaggagaattaagacactaccttgatacaaaggtcgccacgtctctcaatggggaggccgtcgatcccatacacatagctggcgacaatggtgccattttcccgtcatcatcgtccacgttcttctcaagtcgagtagacagtattagatatctcaagacgagatacgccgaccctcgacacagtcaggaacggtgggtcacacctgtcaaatgtcgaagctctcgatacaccccagagctactttagcgatcttgccgccggcgcgcgtgtttcatggccacctaggtagtctcgaaccggcccaagcccgtccattgtcaaattgactggctcaccccgcatagcatgtgacgagccttgatgaggaaatgcgtgggtggttctcgggccgagcagggaaagtagcggactgttgtccaataggatcaagcacttgagagacggtaaggatactagggcgcgatcgatccaggaccgatgtgtagtttcgggcttccccttctgtccctatgaatgaatttcgaaacaactgttcacctcgaaacaactgttcatctacggaaatgatttgagatgccgtcggtgtcagttagatgagcagttctggtacaatcccgtatcgaggtccgggtcgtggtgtagaacagcactacgagggaatcgctggaccggcgatatgcgggatcggcgtgatcctctctccacacttcggttctgccattgtgactcctcttcgatcctcaacgagatggaagttgtacatattgatatgctcgtaatcattcaatcacgatgcagttctcctccaggccacccgtcgacatcgtcgcgcttaacctcttaatcgccgaagacgcgcgcgcttttaccgagtgacggccaatcgccatctagagacaccccccacgtttgcacgcgagcgctggaccttgacgatgtaggttgaccgagagtccaagctcaacgcgtgataggggttggcccggcctggcctggctgggatgcggttggggggagatgttgtccgtggacctcccgcgtcgtctgcccctctcacctcgcaaaacctcgctcgtccacctcgaacgaaagcaaagatcaggacatcatcatcgacctgccgagccgcgagtgattgatttggcccgttgaaaaccaccctcgacaacccacccaaaaaagaagataggacggtagagatcattcaagatgtgcgtatcgtcaggcggcataacgggacgaccgggggagcggagacggcataggcaatagatggggacagttggcgggttgaccgacgagtattaggttcggaaggaggaccaaggctaggcacgacaaggaccacgactacgctggatactttgggaggcacaagttacgactacgtcgcggatcgtttgcaactcgatggaattcgaggatgaagatcacgaattggcgatgcgtggtgagggagacgtggtgcatgatgcagaaggagcacaaggttgcatgacatctcccccgccgtacgctcgacctggctgttctctgcaaagcgtcctcgtcacccaagtcacgacatgcttccagttgaatccgacaactcgcctaccctacgatccgagcagcgaggctcgccagaccgacacgacgccaatgatctcctaccgaacctatctcgtcctagtcaaccgcgcgtctcccaccgctgtcactatcactgccatgtcgatctcctgctcttctgtcgaccgggccgagtctaaaatctacgccgagccgggactaatcgctatgacatcgctcttctttacgacaggggtgcctacaagtacattgccgagttgtaccacaagaagcagagcgacgtcatgttgttcttgcagcgtgtccggtgagtcacgtcccggccgcaaacccacgtctggggatactgaaaggctgactctcgtctcgcacctcgacctcgtcccgtagttgttgggagtaccgtcagctccctgtcatccacagggcttccaggccttcgaggcccgacaaggccaggaggttgggatacaaggccaagcagggattcgtcatctaccgaatcagggtcaggaggggaaacaggaagaggcccgctcccaagggtgagtctggcggtcgaaaagcggtgcaacgacggatgtactgacgtacggtgtgacgacacgcaggtgccacctacggtaagcccgtcaggcagggtatcaaccacctcaagttccagcgaggtctccaggccaccgccgaggagcgtgtcggtcgtcgatgtgccaacttgagggtcttgaactcgtactggatcaaccaggacggagtgtacaagtactacgaggtcatcctcgtcgagtgagtccgggttgtcggtggcgatgcgtgggtccccaaggacgtcttgctgattgtcactttcgcctcgcagcccccagcacaaggccatccgtcgtgatgcccgaatcaactggatcgccaaccccgtccacaagcacagggaggctcgtggtctcaccgccgagggaaagaggaacaggggtctcggaaagggtcacaagcacaaccacaactacgccacctggaagaagcacaacaccctctctctccgtcgttaccgttaaacgtgacgcacggtcaggctccgtgttgggtaccggcagcagcagcacgacgaggtcgagcggcgggtcatgggaacgtctgtgttcgatcgtcttcaagatggtcggtcagggcgtacctggaacgtgtcgtcggtcgcgttgttgacgtcgttgtcggtcgatgggacggagctcgtgtgtgggattggtcgttgtcgttggatcggttgtctcttttagcctagtccacatgttgggattcgaacgatgaatcggattctggcaggcgtcgtcgcgtggtccaccttgcactcttgtccggtggttcagctcgggttcaagtcttcaggtcgtgttcgagttttgttccggatagcgtcgaggcgagatgaggcgatgatgggttgccgacgacatcgggctgaacgtcctcggtattctcgttgtcagcgagacgattggcccggcgttaggattgatgcagatgacgacggcactgaccacactacacgcaagaggaggaaaacgtgggcatgcatggtcttggttgcaggaacgagagtcttcaaggctcaagggtgtcggatgtgaaagggttaggcgatgatctactcgtcgtttggcgtctctatacttttgtatccgcacgatcgtcacgcgtcgtcactttaattcaagcttggaacctccacatcatccatcatcatcatcgatcagctatacagctaccggccatgaacgagcatatgtacgttgcatcagaatcacgtacaactctacatacactacgagaaccctgtaaccacgctgacaggcctgcaagacacaccccactcacaatcgattttgaccacgcttcgacctcccccctccgacaacctccggatcgatggcggcggttcagccgagagccgcagctggcggtcgtgggaacgccaacatacccggcttgcaacagtggatcatggagattccgccggtcactcgagcttggatcgttgcgagcgtggcgatcagtatggccgtggtgagtgcgagaccgggcgtgggctcaagggtgtcggacttcgctgaacaaggctggtgggatcgtcacccggctagcaatgtcattatgtggccccgttgcagctgtacttttcgtacaagtcggcgtttcaaaatcatcaggtgggtacggccgccacatcgtcgtataggattcagcgagcattgataccgaggccgtgtccgatcgcagccctggcgactcgtcacggcgtttctctactttggaccagtcacgctcgacctggcctttcatctgttcttcatgtgggcgcgacgtgggtgacgcgagggttggaccgggactgacctctcgttgtcggctcgatgcagcatgagatattcgcggcttttggaggagaacaatttcgcagggaaaaaggcggattacctgtgtctactggtgttcaacgctagtatcttgctggtaagcagcgaagggtagacgccgggcgtgcctttactgatgcttcgacactcggctcgaccgctcggcctcgcagatcatctcgccactcctcaccctgccattcctgtcggcatcgctagcgttctcgctcgtctacatttggtcgaggaggaacccgacacagcgattgaatatcctcgggctggtcaagtgagtgatcatccgggtccctttgttgcacgggttggcggtcggctgacgtcgcgccggtcctgacctcgacctcgaccccgactccgaccccgatcttgtcagcatcacggcgccgtatttgccatactttttgatggcattttcgtactttatgtatggaggttgggatgcgtgcatgggcgatgccgtgagtcgtcgacagggacgtcgtgctacgcgcgtcgctgacaatcgctggacaggtcggcgcagtggccgggcatacgtactactttttaatggacgtctggccgagagaaatgtggtaccccggcgcgagcaaggtcgaaaaggggccagtcgaggggcccatcagggcgccccggtggatgtgagtcgaggcggtgtccgtgtgatgtccgtccgggaagctgaccacgacgacggcgacgacgacgacgacacgataggaaacgcatgatgggcgagctgagggacgagggtgcagtggcgcagtgacactgtatctaggtcgtggagcacacatatcgcatggattggcattacgctaccaatcctggccctcggcccttcattcatcctgtctctcatcttccctttcgtcgacttttcctccctcgtcaacgattctatcaccgtcaacccggttcactccgccgtcgaccttggcttgacagctatccccgagaccccagacactcggctcgggatctagtcgggtcacgcgccatgcctgccttgggaatcgagtccgaggcgcacacaagcgggagacgtgttcgagcgactacagggatgagccgggcgtccggctcacgatgggctgaagcggaggggcggtcgagtcgacaatggcggcgcaaagccgcgcagatattggtctggcggtggtatgtcgacagtagtggacagggggctactcgagctaggggtagcaaaggcaagtagagtcaaagcgtcaagagaaggcagccgggatagaaaaacaaaggcggcgaagccgcagcggcggggcggctgcgcagatttgggactggcttggtctgagagtgaatggtgttgtcgtgtttgatgatgagtatggccgtcaaaagtgcggcccgttggcccaatggtaaggcgtgactttcctattcaattgtgaacaagaggtcgagattctgggttcgagccccaggcgggcttgatatttttgcctttttgtcaggtggcgcgtatcgccttgttctgaggggggggcctttttggcccaaaactttcgtatctggcgttcacaagccgcctccagtgtgtcgagactgagccatcgagcttggtgtgtcgtacatactttacttggacgacagtttacggacgtctgggcgtgcctgcgcggtggcaagaccagcgcaagcgacactctgggatgtcggcgaagctgttcactttacgagcaggacatgcagcgacgtgggctctgcggtaccaacggactacagtcacgacactgcccgcatccatactggaccgtgtggtcgtacgcatctgcctcgcgtcgcgcagcttcgaggcatcctgtccggtagccgatcacgtcccgctcgaccattcaagatgctgccaggcgctcgcgccagacgaccgaccgttcagatgtcctctcttgacttctgtcacgcagtacaacccccccgcgcgcttcgccagtaagatgcactcgttacacgtaaaaatgaaatcgcacgcggcgcgggaattgacgctgtagacatcaacactctgctctcgctgatgcttcatcgtccgccgcccttccaaacgactacccatcaatggcgggctgtgccacacattccgtgctcgtcgaacccagcgccatcgtcctataatttcgtcggcatgcgaagaaaacccgatcgggttcgtagtagagggagatctgcacctggcaagcggctaccgagcatgaaacctcgcccgacatccccggataaacgtctcgaacacgagcaacatccgcacacggcgcaaacacacacatacacattgttcattctctatgccgacatggccgatcgagtcggaacaggccatatctacagctcgccctgcgacaaccgacatggggtagcagtcctttgcaggtggtactcgtttcgaggtcaagaatgtgtcctctcaactctcgccatgataacggaacctgccactggccctaaccaacccctgcgcaatcaagacgaacttcattggaccccgatccattatttctcgaaaagaccacgagatcgaaccttcaccgcacctgaagagtgaccatcagaggaatgaggcgggatggtcaagtatgacaacgcaactccccttcccgaaaaacgagtttgatcgttcagaggcgtttcccgctacccgttggtctaccgccaacaactcatgccagtgccaatgtcaaggccgagccgttcggattcgacttaggcggcatgaatgaccttaaaggagaggacgaaacgggagatgacgaattggaacacgaggaggacacccggactcccatagacaagggcgcgtgtcgctcgcccgatatcgagttgacgtcgaattttctagtagaacaaggacgatactctcgtggtcccgatggacgcactgggggattggatagcgtcatatctttccgaaccggagatttatcgttcgcgacgagatcgaccccaagcaaatcttccttcagcgacttgtagaagggcttaaaggtaggcataaatcccttgcgggtctccaagctatcaagaacccaatcgagttccagcaaaagtccactttgccattaccaactgtttcaaagtcacggggttgctgccgtcatgatgccggcatgtatgtcacagctacgttgtcagttcctgattcaagtttaagggtatttacatgtatccctcctcccggtgctggtattcctccatcgctatatctccgcatcgatgtctgctcccaccaccgttccgcctggaccatcccttcctcgttcttcctgtcacgtaatggtcttcaattgctgagtactgctacgtttcgttcgaatcggcgaagacatacccgcttgattaatggtctagctgtcatcctcttcatctgtcggcctgccttctaccccgcgcaccaagttctccagagcgctcgttccatatgcctcttcgatggcccaggtgcaaaaccctcaatcaccatagatgcaccaagcccacagaatacctgccgattactggccatcatgcaagttttcacggctgctaccagtacttctcgtgtctcccctgctcctgtcaagcaagtcatcacagtatcaggcccacttgatcataagctcatgtcatcgaaccatacagaccttttgacaccattgagattgccactcccctttctgcccccccacccacgtgcggcagagaatggacagatgtataggacctcccattaaagtcaaacaagtgttttgaatacaatctctgaaacacgtatggaactcgatatcagcataaggactgaagaaattactaggtttactagatgaattattcggaggcatctattcggaggaatcgttgtcgttttcgttgtcttatttggaggaatcgttgtcagaatagtcctcgtggctcttcaatgcaggggcaggggcagggcatatccttctctttgcagggcttgactccatctcgtcctctccacccttgtccacctgttcttttccatccaaactctctgcctcgactctgactgcaactgttccaactcttcggagtagtctgacgctttggccttggtagatgctttggcggacgctttggtagaggtagacgctttggtagacgctttggcaggacctttggcaggacctctcttggacgaagactcagccgtaatacatttcctgacgccccgtgaattgttatttttgacgatatctgcagcgcgcaaatcttcctttagccatgcataggaggattcggtgaaggactcggtggttgtctggggcgagggcataaatcctttgcgtgtccccaaattagcaacaacctggtattggaagaacccgcacctgatcagagccagcgaaagtctttcagagtcatgaacatcgcaatgaacctggtcgaatttagcaaatgtccactttgccagtgccaactctttcagagtcatggacatgtcattgcagtgtcaacaagcatctcttagctgtaccgttcgtgactgcatctggaagaacaatattactacctggaagaggaggtttttactgggcggcgactgaatcccggggcatgcaggcaggctttaacttcggccgcaatggtggtaagactgtgttgcgagcagtgtagtgtagttgggtcctgttaatcagccactcacaatttgcagttccaaaggagcttgagcttgtgaataacgagagggtcctttcacccttaacaagggtggcccaataccaccagccttgcctagacaagacctcgacaagaacagccttggctgagacgtttcctctaaactctgtgctcatccatttatttgcttcgtctccacggttgtgatggcccatgaagaattcgttggcagcgacaaagcggaagtgcctgaaacattggctttgcacgagattgagacgcgcccgataaccaagattaaccaattcagtaaaacaccactttggttgagtcaaagatcctctagaacccctaaccctccttatcgcgagtcttgtggggcttcgaaacgtcgccttgatgcgtgaatatgcaattttcgtatgcgacccgctaacttcgaccatacaacgacgcggtcatgatcagagcgcatccgaagatctgccttgcagccggcaccttgccgttgatcacgtactcgaggaatgtagcgtatataatctgcaacgggcttgcatcatgatcctcgtcgtcaaagccggcgaagcgctggatacgccacttactgcagtataattccccagcgcactcgtcccggccttgccccgtttcatcccgctcgtcatcaggacctgacccagcgagccaaacaccgtagccaaaacggcgtagaaagtccacgtaccatacggcggtagtgttgggatccgaggcaaatacctaatgcaggccgtctgataggccgccgcctttcagatacgcgttcgatacagtcgacaagacgcgggactcacactcccgacggtcgataccatggcatacgacgtgatctgtctcacaatatcaccctatcgcatgcaaccattccaattagacaggtaattggcatgctgagcgcagacccttcattcgcaggctcacgctccgtcccattttacgtatcaggatgcctgtttcgttggacaccaagggtcagcagattccatgaccggtcgaccgaaggcccacttactactcagcgctcccgcagtgaccgaggcaatgccgatgagaaccgcgataggcttagccatctcgtccctcgaatctgctgatcccgccgctttcgaccccttgagcgaaatcattatgcctgcaagtgacaccaggctagcgatcgcttgtcgcagagtgtacttctgtcatcgaggaaccgacgtaatacggcataaattcagttgtgatagtctatccaaccacgggttataattgttttgatgtactcacctcgcccaagcagatggtgcctaggattccagtctgtagagtccagacctcgtcagccgtcaccagaggcctagcgatcggaatccaacgcaaactcacaataaccggattcagaaacccgatgagcgtagcttctgccaacgtcaaccctttcagggcagtatactgtggatgaacagcatgcggaaatcagtctttgactactcgtctgcgggctcaacctggtactgacggttccgagcatgctggcaaagctattccgcgtgcgaagctcttcatcagccgcagggacttaatcgaatatcgacaccttccgactgacctcaacaaacctctacctagtagcaggactcgcaaccccctgggacccaacaacggagatggctgtccagcaagatagctgggcccgagggatcagtcggcctaatcttgcttctgctccgggttctgtcccacccacaggtatgacaagcagacgatccaggttggaagctgagatgaacacgtcaagatgatatcgttaggatctgctcgtacccgaccatgacgccgaccgtactcgccatgcgaaaccggatcatctgtagggcatgaataggcacgactagcccagccaatctcttgacacacaggttggcgatggacgctgtgcatgtcgacaaggagaccaagagcactgcgaaaacgcaaggctcgagcatcaaaatcagcactaggaacatgaggtgtgaattcccattctacatgctcacctccaaggctctcgtcggacagcatcgtgccttagtccctcgcaaaccaccgtcagctagctttagcccttgccggaaggtcagacagccgagctagaggactggactcctcgttgagggttgggctaagaagttattcttccccttcgcttgcaagtcgatgtttgacgatgtgaatcaatcgggcagaagctatgctatcataaaatgtgtgatacagccagcctgcagcctgcaacctgatcagtctgatgcatccgatgcttatcggctacatccacaacaaatgacttcggaggcaattcggaagcatattgacgaaaattcgcatccgcagctcagagcagagccgctgatctaaacgaccggaccgagtgggcagatcaacggattgtcacggttggaaagcttgacttacactcatcccgacggacttgtagatcgtgacatttttgttgcacgatgcacggttcctgaccgtgcccatgccaagatgaagcatgaagatgttacgcctggcagtctgtgcacctctcgtcgatcgggtcgaccgtgatagagttcggtaggcgacacaccagaccaacattcggaccggtcgcctgctttcccagtcatgcgcgattatccccctccaggagtgacctggacacgctatgatccgtgaacaagaagtataagcgtcttaacccccgcccgtcctcgcgcactcttgctcgcctcgacgcttgcatgcgagcgaccggaacttggttccgcaagccatacgccaaggcgatcgatcagctgtttaccgcgagcgcaggcgcggggacagtaacttttttttttatcagatagtgcgatgtcccaaccagcgtcaagctcggccaggtggcttacctagtacaggcagggcctgagagatacgtataagaaagatctcgcctgcactgcgatgtcctcgagtcagctgttggcaaccgttttcgcagctcaaaccagttcatatctcacagattcgcgcgatggaaaagaccgacgacgatatcgcgctccgtatcaaggatgcacccgttcttttcaacgcggaagagtcgaaaaaggcgttgaaagaggaagtcgctccccgcctcgactacctgcaagatgatgaaggctcgaatgaggtaaatcctgacgaagagttgctcgacattgcttggaagtacaaatggctcgccctgctctgcgtctgcgcctttccccttgggcaaaactgtgagcgattcttagcactcgatacgatacgaggcgaggcgctcagcttagcttttggtgtttcagggacggattctgctctgggaccactgaaagcgactctccgcacggagctcatgattgacaacacacagtatggtagggcacagctcaacaaattctttcatggtttcatgctgacgccccttttgtgtcgccccaggtgttatcgacgcgtaagctagacagtcgcccaaaagcgatccaattgcaggctaacctcacatcgtctacgtacagggcgggagccatcatcaacagtgtgagttatggacctactctgagcccggatttgggggatactgagcattgtgaatcctccgcagttctggccgatcatcggaggtatcatgctcgatttttacggtgtcaaccttgtgaccctcgcgtgcacttcattgatctgcgcgggcgcggtagtcgcaggtaggtcgctatcgagcgggacgtcccggacgacctcagagtaataatcctcccactcgctagctctcgcggccaatactggtatctggcgcatgctggtcggaggccatgtgagttgtcttcgcttcacgtatccagaactcgatgttcgtgtttaacgttgtcccgcgccttgggttagattatgatgggctttggcacggctgtgctagattcagctcagcacaagctgttctatcactggtttggagtctcaggtttagctctcgcatttggcctagagtcagccgttgcgaggacggtcaagctggtttccgggatgaccaccattccgatcaaaaataacacgggatggtacgggtaagcagattggaattcggagtgtctgggaaatgtgcgggcgctcactttgacttttctgcgctttcagatggagtttctggatccctgccgcgctctgcggcttctcgttgctggtgaacattgtctacgtattctgggagaggactgtagtcccgaaacgataccgcctcactggggttcgagcggctgccattgccaagacgcaacgtaggcccgactttcgcgctctattgaatctgccttggtgagtagagccgcattggcgggtggttttgtaggcttttctcatccaacttgagcaacagggcgttttggatcttgcccatgacccaaatcttgcaatccgaagctgcaggggccttcggtaattcagccaccgatctgatcaccatgcggggatacgatgtacgtcacccgcgtccctgaaccgtatggtcattcccgaggctgaacaaaacgaacgctccacctcatcaggaagatgtcgctgccttcacggccaacgcccaaaacagtgagtacacttccacctgtcaagtcatagtcattgcgatcgcttccactgacgttctcactagtcctcccgatcgtcctcacgccacttatcggtctggctgtggaccgatggggtttccgtttccacctcacggctgtggcgccgctgctatggatcacggcttgtgctctcatcggttggagcgatgttcatcctctactcagcgtcgtctttgcctcctttgcaggcatgatcaattccttcccgtcagatagagcggttactgttccgctggggcaacaagtactgatctcgcttgactaccagcttccaagtcactatcccgctgctcgtccgcgatcaatccaaattgggaacggcctttggcgtctggcgttccttcaacaattctgggtacgacctcgtgatgcacaagtagacatgtcgccagcgctgatcaagcactgttcactttccgtagtaccaccatcatgtcgatcgcgtatgggcggatgcaggatgataccgaggatggtggttactccaacgttctcaagactggtatcgcgttcaagtcgttcgcgttctgcctgggactaggctatatctggatggatcgtcgctacctcgggaaggggatgagcatgggcgagagacagaggaccaaactggaagaggacctggtgacaaacgatcccggtgagtcccttcgcctaaccaagtcagtgtcaacgtgtcgatcactcatcttgatcctcctcttagatcatccgcttgtagcccgacccgtcagcaagaagatcacctggactgctctgatagaattgacttgcatggtaatcgtagcgtggactttgttcatctactatgtgctctagtaccaggggataatctaacaatgttacactcccacctcttctcgaacctttcaaattgagccctcataccgatcgtgagatagatgtccattcctagttgccagggtacggtctgcaatggtcacactgggcaaccggctgttcattcgaggtcggaaagagcgacagcctctcacttctactcctcaagctcgggcccttcgtcagaatgatctcaccgcgagtaaaggtaccgtagtctgatcaacctagatagtcactcctgatagatgacagagccacgaagcgcatctctctctacctttgcgggcgaatacgcgtcgccgcaggcttccagctgcgaggtggagggactaccaggaatggctttttacggtaaaattacgagagtaattacgagatttcataggaacggactgccacgcgagcggggcgggtattgtcttggcgacttgtcgcatcaacatcgacccgatcaactttattcaacgtcgacctcatctacgatctacgattgtaacggcccaatcacaaagactaccttgtacccacatcggaatgttatacgactgatttgccgtgggattcaatccctgcacagccttcagggcccacaagtctgcgcgatgacggattacggaggctctcgacttcggagatgagtgggaaagccaagtgaatcccttgccaagcaaaagcctgtggtaagggggaaaggggaaaaggaggaggaggaaggcgacgacgaggatgtgtgcttcggtctagcctgctagatgatggtggcggtccgcagagggggcagcgagaggaaaacaaacaagtgcataccgatccttgcgaatataataccttgcgacacgtcctggttcatcacataggacgatccagcgctttcccccccttttgcctctctttccttttgttcattacgacgcccagaaacctcgaatatctactactacttactactctttcgacaagaaccccttttaaaaagctcctcctcgactcgtgagtttggatcgaatcgaattgacgcgatccgatcaaatctacgaacctggaccgtgctgatcatacctattcatcctcgtagaatccatcaaggaaacccagcttctcactccatcgtactagataagacttctattcaagatggttgccactactttcaagggtctttcgaccgtcgccgcttccctgctcgccctccctctcgccagggctcaggtcaccgctactttccccaacggtgttaccaacccggacgtgagtctcgctcgagcttgatagctcacccggatcgtctatactaaacctcgcaccttcccactcacgcgtagaggcccgagatcgccgagcccggttcggtcatcaaccagacttcatactcgcgtctcctgaccttgaacagtgtcgacgacttctgcatctttggaccccccgagcccggcccagactcgctcattggaaacgtcgagcctatcgttgtcgcctactgcaccaagcccaggaacggtgccaggttgattcctgacggaaccgtccactctgctcacgtaagtctgctcaggcttacaacaaggttttataaggtcttctgagacacaatctgaccttcctcgaccttcctgctctccacgtgctacgactacagttcgtcaagaccgatgcctatgtccagatcaacggtctttgggacggaaccaaggtcaacatcccctacggtgactctggtggtgagctcgaccctcacggagccgagaacgttggaaaccccatcggtggaaacgtcacctcgaacgtctcgggccaggatgtcttttacgaagagtggatgtcgtttgtcagccacgaccagttctgtatgaggatctgtaccgccgagtggggtggtatccccaccagcatcatgtgcgagcagtacgtatcccttgctgtagactccaacacagttgccgatcactgacgctcccccttcttgcgactatagcgagctcgacgtcatgggctgtgcgttcgtgttgcccagtgtcaacatgtacaacaacaacactttcacctcgtgcgaggctgatgtcggtaacgcccctggtgactaccccgtaagtcccgatcctatcaattgcgtcgtcccacctcgcttgatgctcatgcttgctattattcccgttcgactctgtagcaacccgatggttccacctcgactttccgtcagcgatacgtcggttcttacaccaacgagggtactgtagcttactggaccgtcggtcaggacgtcacccccgccggccccgccaccacccctgccgtgtccatgtgcacgacctactccaccatctctagtaagcctgaacctgtcttgcttgatcacctgccgcggacattggcctgacactgcgttcaccccctctcagacggaatcgacactgccaactttgccgttgtctcccagtctcctttacagtctggtgttgccgcggccgttacgaccaccgctagctcgaccggttcgatgagtatgtccacctctgccggatccagcactgcccgaaacactggcgcttccaccggtgctgctgccactggtgcttccaccgccaggaccagctctgccaacaccgccgccgcctcgggtgccacttctgcccctgccagcgccgccggcaaggtcgactttggaatgggaggacttatcctcgccggtgctgctgtcatcggtggtggactcttggtccttgcctaagcggttcccttccgatgatcagctcggttctcggtgcagtttccttgtttttgcgtaacgacgacgaacgttttccatctagtctcgggtctcttttatttctctcacacatatacgtcttttgtttcatttgtcactcgctagtccttcatcttctatatgggacaaggctatgcgtcataccgctcgttatcgatttagaaagctttcgtcggtcacgcatcagcttcggcctggtcttcagcgtgggccattcaagggactggcgggggcgcagggtcatcatgaccagataagcatgctcgctttgtgtaccaagagatgttcgagtgctgttcgccactcgttgattgggtgatttcgttctcaagccggcgttggattcctttgtaccgatcgcgttcggtcacatccggccggaagccgggacgcgctctgtatgcccggcgtacacctcagcacccggcctcacgaaggcccagatctatcgtctatcaacctagtcgactctatacatttggcgtcgcaagaccctctatcatccatctgccgactgtctactctccaacttcgacttgttacacaatcaatcgtttgaccttcgatccatcatgagcggaatctttcccacacaccgtctgttcaacaagaacgtcctgatcactggtgcatccggtggtatcggagcagccacaggtgagcggtgatcgtcctgtaccgtggactgaggggactgctttgctgacttgcctcgttttcttgctcatcacctatcgtccctccgtcgaccggtcacagccatcctctttgcccgagctggtgccaacattatcatctcggcccgtcgtcccgacaagctgtccgaagtccgtcaggcagctcaagctgcccacaaggagggtggcacgggacaaggaggcaaggtgttcgagtgggtccaagacgttcaggatcgaaggggtgtagacagtcagtaactccgtctgggcactgatactgaactcgagcggtctgttcgacgatgagctgatctcgagagacggtccgctcctttcatccccgttctctttcgcttcccaacggaatcgacgggtcgacgcagaactcttcgacctactccctcctgatttcaagaagattgacgtcctcgtgaacaatgccgggctggtttacggtcgtgaccaggtcggggatgtgtgagtctttatcgacgcctgcggactcgttctagcctctctgaacacagcttgaccctacgattggcccggatgagtagcgatgagcaggagatggacatcatgttccagacgaacgtgctcggtatgatccatctcgtcagtgccacgtatcccatagtgcgcatagcgatattcgtgcatctttcgcttactttcctgcaactcggttcatcctggcacgatgccgacgttcttccgatccgcccagactcaaatgctcgtcaaacgcaagtgtttgatgtggacctcggtgttcagccgatcctccacttacaacggatcttgttcgcagacttcaagcagaacaatgcgggtcatgtcattcagctcggatccatcgctggtagggaagggtactcgggcggatcgatctactgtgctaccgtgagtccattatcgagacccggtgataccctagggtctagtcgattgagccattgcaacgatctctctcgcagaaacacgctcttcggggattcactgtggccatgatgaaggagctatacgatacccctatccgggtgaccgagattcagcccggtatggtcgagacctgtaagtcgaccccgtccaccgacagttacggcaaacaggatcctcgcgtctgaaacgagtgaaacgctctgtgtagccttctcgatcacccgattcaggggagatgaggaggccgcgaaaaaggtctaccagggattccagcctttgaccgccgaggacgtcgccgaggatatcgtttgggccgctagtaggaaagaccacatgtacgtctctcgacccttgtcgccactcgagagtgtgataactaatgcttgtctacgtgttgtcgtccgtgtcgatttgatagcaacgtggccgagaccttcatcttgcccgtcaaccaggcttcgcccacgatcgtgcacaaggcctagacctagacgtcggacgaaaaggccgggcgtatgccgtcacaggcgaatcaaggtgttgtatcaagctagcacagatgaaacgaaatggcagatgacgggtccggttacggttcatctgcgtttgttatgggtggcctgcctcccctctggtggacgatcggtagttcggcggtcgcgctaccgtctacgccgatgacgcgggttttgactcaaagattcggggctcgggaagaattcgtttggccttccatcatcatcagccatgccaggcggtgaatggccaacgggcagggcgttatatttagcctccgtttacttccggactgccctttgacacgcggggttcggtaggcgaaattgatgatcactgacaacgggatcataaggcgaggcggacacggggacgggggcgggatcatcagggagatacgtactacgaaagcgttgtaccggtcgatcgttcagcgtgcaccgagtctacgttcactagcaaacgttcaaacgtcgcatcgccacaggcaggtggagccaggagaggtgataatcgggccttccttgcctcccctcctctcgcccgtcgcgctgcttcgcactgcccgctgcttgaccttgccacgggtcagccacgctgttgatgagtggtcttgattggtggtggtggcggtgggccgaggccaatggattgattgattgattgaattgattattgatcgctggttcgcgtaactcccctgcacgatgatgatgagatatttccctgtcccctgatactcgttcggtctgtcgcctctctagatccacccagccccgttccttttgcaacgcgagtcgtcatcgtcccttgcccttgacaacccagtagctgccaggacacacacacacaaacacgcactagtagtctctctctctcacccacacacaccggatagctgtcaccaacctcgtccgaccggagggaaacttttgaactcggtcgcgatttgggatctacttgcgacgtcgaatattgggtcggtagctcttataatcaccattcgaagacgagaagaccgtaatagactctgtccaatcgaaagatcgaccatcataattgccaactagcgactacatcactgacatacggcgggaacaagggattgcataggaacgcccggtccgaacctcgggacgacatcgacgcatatcagaccctggcaacataatccgacaattctagcccgtatcaatctgctttcgtggcaagcatcattgtcataatcggaaccgccccccatatcacttctcaacatctcagcgcaccgcctgttgcttggggcactgcctcggtgacgctcgatcggtggatcgtcacgcttcagaggcgtctgtgcttaccatatcaaaatcaacgattcttttgcgcgctcggttcgtcaagcgttccctcgctacgatccaccctcgcacatctccacctcggaggcgtgatcctggatatctgcgcagacgaacgacctcgatctcggcgcaatgtgtggcggggtaggtgataaccatcacgctgcatcagcgccgacgtcaggtgcaaacgggacgaccaaacaacacctcgcacccccctctcgtcctagcctgcaaacgaccgactcgatcgcttctcatccttcggtttcctcatcgaccttgtccccgacttctccttccgccgacggaggcccgcagagggaaagaccggccgcttcgtcagggcacggatctcagatcacaaaggtctgggctcgaccgacgaccgacgaggtcaggcgcgaagtgcacttcccgcctcatccgtatgctcgcaggtaccctgaagctggaccttcttcctccccagcttcgtcgacttcttccccaacgacgacgacgacgacgacaccggccgtgcaatcggacgttgatgaaccggaccgaccttttgctgaaccggaagagaccgtccgatggcgagtcgccaactgtcggattctttggggtcccattgaagacctcctagggtatgcgccttctgatgtcgaggagaccatatcttggtgggcagaccgggtacatccggacgagcttccccagttggaaaaggagatcgccgaacactgcctaccaaatttcaatcggggggaagccaaggcgaggttgtggaacggggtgtataggttcaagaagaaggacggatcatggttgaccatcggggataggatgaatacggtcagggacgatgaaggatacccggtgtattgcgagagctacatgtgagtgctgccaggcttcatcgttggccgtctttgcttgaactgatagactcggttgactctgtgtgtccagctatgaccatgggatgcggatggctgagaggtcgaggctgcagtcgatcggcaacgagaacgatttccagatcgtctgcgggaatatgtacagcgccatcttcatgatgaacagctcgggatacggtgagtcgatcagcgtcaggctcaaatcaatgcgaatcgccggcttacaagtcttggtcgcacatttcagtgacgttcatgaatgccgcagcagagcgtttgaccggtttcaagttcgaagagatctcaaaaggtacagtccctcccttctcgcttcaaatcggaaagcagaagcagacgaagctgatccgaaacgtttgtgcaatttccctcgggcggattggttgatggagcagtgacctttcacgaagcggtccattcgttacgaccggacggatcggcttatcccatctcgcagtgccccatgtgagccgatggacgggaaatttttgagcacccctaaccataagctaacgatgcggacgatccggcttgggtttacagttacctggctcaagtggaaaatacaaagctcaccaacgcgcccgaggtgtttgtggaccgggatggacggttcttccctgtcgcctattccgtagcgcctttgcacggtggataccaacatggagccgtcatcgtaagtgaaatccggcctgacgcttcctgatcgatcgctaacaaggtagaccgaccgtgctgcaggaattccgcgacgtgtcggaagaagtacggctagaagatgatcgaatgaaggcgctgcggcagaacgagcaaaagtcggccaagatcaagcaggaggagttcttgagacaaaacatggccgtttttacggactttttgtgtcacgaagtacggaatccgttgcacggtatcgcggccaacaagagtgagtcgtagtcgattaggctgccaagcaggattcatgaattgatcacggtgcattcgaccatgcaagactttctcttggaatccatacaacagctcgaagacgttctcaagccattcatccagcaggaagagagcggggccttgcccccttcgaatggggactcgccgaaatcctcgatcaaagaggggtccaagaccttgttcgcatcgatgaggggttacttgcaggcgattgacgagtgcgcagcgcatcagggcatgatcctcaatagtgtgctggtgagcgatctctagctgtggatgaaccctttggacgttttttatgaagctgacatcgtacgttgcacggcaggacttgtcgcgcttggagatgggcgccctgaagctctgcaaggagcctttctcgccttatgagattgccatgcaagccgtgaagatgtctcgagcacaggcggaaggaaggaatgtcaagatccagctagaggcagatgaagagaccaaaaaaatgattgtcaagggtgatcgtgagtagggccgtcggtctaggtcgtgcaaacgaggcttatatatccctcgaaatatgtagctacacctgtacggcaggtctttctcaaccttattggcaacggaatcaagttctcccattccggcgggacagtcacggccaggatgaagctgcaacaacatgatcatacagacaagtacaggatggacgggtccattcaggacgagggcgtaggaatgaccccggttgaggtcggcaggttgtttcaacggtttgcgtgagtccatgcaatcacttctgtgaggttcgcatgaggactgatgcgacttacgctcctacgtacatccagacaagcgaatcaacgtgtctctgaagtgtacggaggctcaggcctgggtctctccatcagtaaagaactgctcaaactcatggaaggagaactcaacgtcaagagcgaaaagggacagggatcacaattcatgtttactgccaagtttgccaagctgtcaaaagccgaaacggaagaataccgtgacaaaaactcgaggcctgccacacctacgatcgacggcgctgggaccgtgacgcagaacaggaaacacgcaccgaagacgagtcgtcgccgcttcacgcacatccttgctgccgaggacaacgccttgaaccgtaaaattctggcaaaatatcttcaaaagtgcgacaatctgacgctcgtcaacgatggccagcaagccgtcgactattacaaggagcatgcacatgagatcgacatcataatcatggaccaagaaatgcctttgctcgacggtaggcaagctaccaagatgattcgagaatacgagaaggagcttgaagcgcaggacgccaaggtgattgaaaaggaatcgctcgagagcgggccagggcagagacggaaacgcaaggaatggcttcatcgggtacccatcatcgcgctgtcaggcaacgtgcggtcggaacaggtagccgaagccaaacaggtgagttctctgtggacatccctagagacctctggcataatgctcaccacttgtgtatgtggtcgtgtattaggctggtatggacgattacctcaataagccatgcagcaagacaagcctcgaaaacatgctctccaagtgggaagaggtgatcttaggtccagcagacgacaaagggcaagaagaaaactgagccgagattgtgaagaatatctctcgggtccgctcagcacacagtatatcaactttcaacaacataggattagcattcacacaggacgcatagccacggtgggaacaggatttgtcacgccacgtcgtagacgatatctatagcaggtagtactgaagcatcgtggagccaacacaatacagggcgtcggtgggagagctcagacgtcgattgtatcctatatatatacccctctcccaccgcatccataacagatgtcaaccgtctgtatgatcaccaaggtaatcgtcgtttccatccatgtggtgagacaaacttccattaaagagcatgcttttgtggccttgctctccggctcagaggtttctcgcaaaggtacattactcgtacaaccacagcttcaatcgcctgtcatatgccatcaaacctaattgcgatttcttataccacccttccttgcgggtctaggtgtgagctagatcgggaggggccacagcagcagaatcaaagatcaatcacctttagaaagttgacaagtcgcctgttgcgctcatcgatcgatcccttttcacggacttgaccgtcatcgcgcgaccgggacagacgtcatgggtgaacagaactcattcatgatcatatgctatcgagggtgatcatttggtcaaacgttccggccaggcctttggtattgggcaatcacaccagcatgagtgagattcagaatgtcgtcattgtttcacatgaggtcaaatccggagatgcgaagccatacgtgacctacaacgttaaaggtacgacaagtttctcccatcaaatcccagatctacctggctgaccggaaactacacctcttagtgtccaccgctaccaggtcttggaacgttcagagacgatacaacgacttttgtgctttacatgccgagctcaaatcatcgacaggcaaagagccgccttcgcccctgcccccaaagcactctttccgttggacaagaagtattgacgatgcaagggtgagccagggtaagacttcattctgaaaggatttctgctgctgatcgccagcgatcgcatcttaatagctcatatctgaaaggagaacaggattacaggaatacctccagaagatcttggcgtgtaaagatcctcggtggcggttggcttttggctatcttgacttcctcgccgtcccagcgaatctacctgcgggcagctcacggacgaatgatacgacggccgacaagctcgctcggtacctgccttcgtcacaacctcaaggtggtcaggtgcaattcacctcgtcgagctggatgaccgagcacaatgcacttcagcagtcacttcgtacggttagggcgagtctcttgaagcgagatgcgttggcgggaatgggcgatgcgggagcttccaggtccgcggggatcgaagcgaagcgtagcttgaaggagctaaaagtccggctggaatcgttggacaaagggctcgagggtgtcgagggactaggtcaaggggaacgttcgcggcgggagggattggtactcggcctcaaggacgaagtgggcaacgtcgacaagatggcagaagccggggttcgagtgtcatcaaatcactcggctagtaccagcatgggtcgatcgggaacgcccgtcaacgagaacgatcgcaaggccttgttgggaggaagcgccgtacgaccagcaggacgggtgtttggggctacagcccatcaagcaccccaggagaccgccgagacccggccgctcgacgatcaaggcttgctacagcttcagcagcatcagatggacaatcaagattctcagctcgaacaactgtcgtccgtcttgcagcgacagctgcgattgggtcaggatatcggcaaggagattggcgagcagaatgacatgctcgatgatttgagcactcaggtcgacaagacgggtgggaaactcggtcgagccaagaggcagatgaatcggtgcgtactgttcacctacaggcatgctctacggagacggcgagctgacgaaaccggcacgaatcatgcagactcggctgaggcgtgctttctgactgggtataatgatgatgtctctacggttgtacaaagtgtggcatatatacctctcggctcggctcacatgccatcatgctccgatgatgctcgaaacccatcggaaccatcccttttccacctggatgtcgggcgtggtcgttccctcatcgactcgatcttgaccatctcgtctcaccttgatagcatgcaacgctcgaacgaaatcgacgtcgacccaactccaggcactcaaaccaaacgctgccatgtcgtccttggatagcgctcctttcgatccgagcttgtcaatcttgctaatgagtcgtgctgctcgcttccgaaagacgtccagcgctgcggtcgtgtgctgtagaccattctggccgccggatcgagtagcagcctcgtccccaacctcttcctcgtcctcgctctctagcacgacgtccccgtcccgaggcaatcgaatgtacccggtcccacccggatgagcatgttcgcctcgtccgcccatgcccaccgccatcgcgcagaaaccccaacagacctcgcaaagggtcgaatacgctccataagcgtacccccagaccccgggggacggccgatccgtttcccttgaaacgggctgaccctgttcatcctcccgtacggacaagacgccctgcacatctttccagagcgccttgtcggaaaaggtgtgagagatggacttggtatagatggtcggtttcgaggtgggctcgatggtgacgttctctggcacgtagcgtgctcgcatgggcgtgaaagtactcgcaccgagagatggcaccgtctcgagcgtcgtggatgagcttggcagcgggttcgaaccgagatccacgagtaggtcccagagttgaggccgatccttaaatatggtatccgaggtacctggtgcggaatggcgcacacattcgcatgataagccctcttggaagcgagccatctccctctcctcgccgacccgtgccgactcacatgcgatccaacctcccttgatgccctgtatcttgctcatgtccatcaaccctatcgaacccagaaacatcgacttttcgaacccgacgtccaccgtctgcccgagcatccaggtacaccaggcagctttacaagcgggttccagtggggtgtgtgagaagaagagctgtgattcgtcgattatcggatgagatcttggtgtccttcatggggcaagcatgggcttgcacggggacttacgatccttcgattggtcatggcgtacttccacaacgtacaggtgttggcgtcaaaatgatcgaagagcgtgtcgcagtaatgtacaggatggtccgtctgagggtagatgtttacgagatgagctgacgggtgacagatcgagctcaaccgctcgagggtacctactgataagcccaatgatccgtccgagagagcttgaaaggccgaccgtgtccccacaacccgtcccgagctcgagggggaaggtgcgatggaccggtgttgaacccaaaacggatcgagcaagccgtccagccaggcttgacgggcagtttctccctgagcgccggtcagggtataatcccactcgttggatatccgagcgacgagatttcgtaacccggaaaggggtggaaagtcgagcgttgacgtagagttctcgcctgtccgaatcgataattgaccgggtaaaatgagctgacgaaacggcaagagcgggtaggggacgcaattcacccatcaatacgcccaagctgagcatcgatctccctctccctcccgtctcttttccagcctgcttggtctcatccgggtcgagctccttgttgtgaaagacggttacccctagtctccccgtccggccctgcgtgctcgatgatgcatggtgaaagtagaacgtgtccgtttcgaccaggtgtaacccggaaggtaaagcctgaaattccaacccttcgagctcttttgtatctgttcgtcgagggggaaacattcagttgaatggttcgaacggatcatgctgtgcgaccttgcgattggtacttgactcaccatggtgggagctggtccagatcaaggactgtcccttgtgatcgtcaaacagcgcgagaaagagcgcctcgatggcgatttcttcaggcatgacgacggtgaccaagggtgtcgaggtagcagccgtagtaaacgtggtagtggtggtggtggtggtggtggtggttgatcgactatatatgttccaagatattgagccagcatgatcccaacttgcaactcgttcgcgtgcaacgacttttggcgtttcggagcaatccggacacaatgtcgaacaagtaaagtcgatgggtttggggaaaagaatacatcgatatatattaccacagacacatacacacacggacgattctcaactgttacaacggtagattcctcttgggagttacagacgataaaggacaccgagaacagacctacaaaatccgttggttaccagcacagcaaaggagcgaagccaggacgatctaggtcgctcgatgagcatccccaaagacgtcgtcatcgtcgcggtcgtcttctgcctgctgctgctgcttctgctgctgctgctccctctgcctcgtcctccttccaaactcgctgccgttgacccaactctcgtcgtccccgatgatccgatcggaacccgccatgatggttccctcgtcatcggaatcctcgacctcgctatcagaccacccctggaacgacccggccgttcgagcgggtccagttggcctcgctgtccatcgttcaccgaggtgcagatcccgatcgtctcccctccgaaaagaagcctctgtctgcgggttcgaacgctccgaccttcctccttcggacatggccggctggagcaagctggacgggatcgaggacgaggtggattccgccatgctcgaccgggtatcttgtcgttcgagcggcgtctggcggggttgcgaccgattccgagcaccagggtctgcaaacggatcgtcgttcgagctcgagccagagtggatgtaggtgtgcgagtgtgacgactgcgaatgcgtatacgtgtgggccggaccgaggtaagccaaacctgacccgagatcgtacgtcccaccctcgatcgcctcgtaagccgggggaggcgcgccgtcaccccgactgctccccgtcaacgtcctcgcgatcgaatcgccatccatggcaaagacgtcgctctcggccgtcgagagggtcgaaaagctttccctacgcggtcgagcgtcgtccagggtaagtctagcggtgttgatgttgttgttattgttggtgtgcgcatcgacaccggcggcggcggcggccatcatcgccggtagggtgaacggggtgacggtgccctcctcgatggacatggtctctatcctcggttcgtcctcttcatccacgctgagtcgtcgagtaggcaagacgaacctccccggcaaggtcgacgacgaggtcgaggtggacgatccgctcggtccggtcgtcgtcgaggcggataacaatcctcgtccactaccattcccactcccgcccctcgagtttaaactgtcactcgatgtcgtcatcccggcgtggatggcagacgtgtccaacctgctcaacctacccctctccttttccgcattagacctcgctctcgacctcgacctcgccgtcgtacccttctccccagaaggcgtccccggcgtcccgtccagccccatcccgtgggccccgacagcgtgtgatcgatgtcgacgacgccttcgacgatagaaccagcatcctccgagcgaagcgaggaagcctagcacgatggtgagtaccacggcggtgatgatcggtgtcaagatactgcgaggtcggatcggaagacgggatggtgaatggttagcttcattccgccacttgcccgtaccccgatgagacctcctctggagcggatcgacgtacctcttgttcttctcctgaacctccctctcgctacccgtctgaactggcaccctctgcaccctgacgctcgtgtacactcccccgttggacgtataagtgaagggttccaccccgagggtatacgtcgtcccgtccagtatagtcgtctcccctaccccggccgtcgaaggcgacgaggaaggggcagaagaccacgttgagcccagagcggggtaagcggcggtatagctatcgttgttgttgtcattattgagatcgtccccattgatagggatcgacgtggaaacctggtgaatgttcttgtccatactccgagtagccgtcctcgtcgtcccataggtcgtcgtcgtcgagtgagtcgcctgggtggaagtcgatggggaagaaacgttggtgggcgtggggtagaggatgacggtgaatttgccaggtccgatctcgaagacggtggtgaccggcatgatggcaaaggtcccagggtggtccttgcggagccgtagaggtgggatgtagtggttgtggttgttgtctgtgtctgtgtgtagatgatgatggtgtatgacctgtatggtatatatttgttgctaacgactgtcgatcctgcgtgggtgtaatgttcgatggcccgatggtggggtcaactggggtgagtgtgtgtttgtgttggccgggatgatcactttacacggcgtgacgatgacatgctacgtactatgcagacagacagagtgtggcaagtaccgatggtatgttacgatgggaatgggatgggatgggatggggttgtacatggtgtggatggggttgacatggaagtaaattgcccgatttcgcagtcgcaaagaggtggaaaaagggaggaaagactcaaagtagacagacaccttcacaccgacacaccgacacagacacgcacgcactctgcctgaacgaggtctctactcgctacatcatccatgtactctctggttcgtaccacccttgttggtctctcttgatccatcatcgactgcgacccgacactctaccagagcagagcgtcatcgatcgttccactttagcgtggccccaggcgcgcgcacacacaaacacacaaacacatggacggaatcagaattgcaaccaaacaccgtccaagttgcaagttgcaagttgacatggtcatggatggatgctatacagctatacagcttagctactcgtccatatccatctccatactctcctcactccccctcctctcatccctccggatccccatctccctatcctcccgctcaagatccacatccacatcctcccgatcttcccctcgtctcacagcggcaacaacaacgtcgtcctcgtcatcgtcgaccttgcccttgacctcctccccacgatcgtcccctccccgtcgctgccctcgttcatcagtcgcccgctcaaaccctatcctgtcccttcccccacctccgatgaacccgccccctagtccgagggcgaggtgagagttcgaggagagaaaagccggttgtcgagcgggtacgggggtgggtttctgggttggtaaattggggtgtttggaatgagaattcgaaatcaaagtcgagggcggggtcgaatgagaagaaggcatcctgagcgtcgttattggcggcgagcgagaagggggtcgaagagcaaagtggtaatgtggggtgtgaatgtgatggttgatgatccactacggacgaacgaaaggttgaaagtcgcaaacaaataaaaacggaggagtccaacgggtcggatcgtcgcaacgaaaacaatggccagtggtgatcctgacccctaacgtcggcggagatgctatatgttaatgacacgataattccgtcgttgcaattatcccagaacggacttcaatgccggtgaatcgagatccagtccgagctcgaccccgaggccgtgtgtcaagcgagagtgatcccgacagccaaacaaggccagacaagggtcgatcggaaaggtgtacaccctctcccccgtttcccaaaacctaaaagtcgccggtatggtctggtgtacccttgtcgagctttcgtcacttcagactgtcgttgacggatcccagcgggtttctgctaatcggtttgtcaatggatggcaaggtcgagcacgaacgtctgaccgggcttcatctccccgcctcttgttggtcttcttctcctgccaaccgatccgatccaatccagtccgaacttaacgggtccgtgggagcgcaactagcgactacctcgatctgaacgagaggacgacccaagaccgaggttcttcctgtacggtaagacgtcgtcacgcctatcttaccggtcgagcggctggtctacccctagttggttcgagggggtccgattaccgatgacggattacgggttatcgattatcgatgactgatctcgaggatccgggaagggcgactctaaaggtgatgctctggcgatggtccgggtggggttatcaaggtgattatgaaacgggtcgactctgggtgtgtgtgggtgatgatcgttcgagtctagtccggtagatccgatccgagccaagtagagcagagtggagtgagagaggaggaacgggacggaaagagcggggcggagtatattcgaacaaccctcgttcgtagcaaagcaagtggtaggtggatccgatgagatgagatccgggcgaacagactgtacagagaaaaagagagggagagaggccgagcgaagatgaccccggcgtgcacgttctaggtcgagcgggtcgggcgcagtgggggagagatgtagggagattatacgatggtcctcttgccagttgatccggaactaaacactacgaggtacacaggcggtcgttgttgtgagtagatgcataggtgtataggtatgtagctataggtggttgttcgatgacgacgttgtattcggttcttttgacgcgtttcccccgattcaaacgagagatcgcgagcgatcagccagccagccagccattttggaatgatacgtgatacatgattgagacctctacaaacacggcagtctctgaagatgctaggtaatcttcacaaagaggcttccgtctgatacctcctgctcattccagaacgaatcgctgggttcaaggtgcaaagactggtcggttgatcgattgaagaggaggaagaggggatgtcaactctgtgacgagtcgccgagttgctcgcggcctcggctttgccccggcagtcgaggcttggcaccgaccaccgacctcgtttcgtgtcatgttccactctccccacccctcccaccaccttgtaacattgatgacttggcatcaactaggaacttgctattttaccaactagtaaccagtgtcgtaattgacgtcgacgacatgtgtcgaccgctttgggcaacaagagacagagacagagatgggacgaagggtcgacgtagagaggcaacggcggaaacaattcaacggaatcagatctatttacttccgacgatcatcatttttacttccgaagacgatgacggcatcgaaattcaccgaaagattcagcgacatcgacatttgttcatcttcaatcacctcccattcccactcacctccatgtcatttaccccccgaaaggttcagcccgggccccgaccctgtgatctaaacctcgtcctccaaactcgccctccaacccgcaaccatcccctcttatgcccacccaccacctctacgtatccggccataacccataccacaaactcctcccccacccggacctcccatcgaccttcgtctacacgccgacggacgtcctccatccggtctggcgggaccacgcgaggacgtcgtacgggatcgaggaattggcaggggaatatgtatggggagggtatgcgtgtagtctgatcaggttgtttgatagtgagtgtcggctctgcgtctgggtcggggtcggagttgggagcgcagctcaggggtggatgaacctgatctcgtatccctcaagctctcgtgtgtccgacgagttcgaacctgaatcacattcccaacgatccgtcgaaccgaaccgactactgaaccggacctgaccttgtttctccctcttgcgcgcagggtcgggcaagtcgacctggatccaatacatcttcctgggccacccgcccgaagccctcttaccccagtatacgtgcgaagaagccgccgaatgggatatcccccgggaactcgaggtcggaacagggtttccttcgacctgctcgataagcgaggaaggccagacgatcagcgtgggggacgccctcgacccggctgaggagctcgacgtcgcccgtgctcccgacctggacgttccgtccgccacccccgattacaacccagacaaccaccatacgcctcgatcagactcgtccgactcgctcgacctgatccccctgccccggctgatcaaccccttgaagaacctacccgacaagctcaaagtgatcgggttcgatcagcccgagggatggctagatctcaagacggggatagtcagacggctagtcgacggccgagcagtcggcccatggacgaacgcatcagggcatgcagagaaagtggacgaacacacgatcgcggacgaccaagcgggacgttggagagacgtcgtctgcctgacggatgggacgacctttgcgctccccctcgatctccctacgcgtggtgtagggttgtacagattcccctcgttttcccacctcctcgactacgccgatggcgatgaatcggcgacattcctcccgctctccctgcctccggacatagggaccgaagcaataaccctacacgccgggacatcgcatttgctcgtctgggtaaagaggccatacgagcaggtgctcggggtaggggacaatcgattccactcggccacgccgttcccacccgtgcatcagcgtgataatgcggacaggaatacagcgcgtagaccgggccacgtggaccggccgacagagatcgagacgttgagtgcggtcccattgacctgcgtcgcggcaggggagatgatcagcggggcggtcagtcaaggtggcgaggcgtgggtctgggggaaaggggtcgggccaggcaggttggagccagtgcggatcggtcgccaggattcggaatcggatcaagatgacgagggcggcgaggaggaggattgccgtttgctagccattggggaagggtacgaggtggtcgtcctcgagaacgaccgggtatacatccgggggtcaagtacgtgcgagtcgtgccggtcttgccggcgagagatcgacaactgacgagacgacccttgttgacagacgaatttggtcagctcggattcgaaccctcgatcgccctggacgactttggacgggaacccgactcgccaccggattaccccgaatggacaccccatccgttctttaggggggaacaactgagagtcgaggcggtgtggaccagagattgggcggtgtggataaagtgcgtcgacaagtaggcgggacttgtcaggttgctgcggcgattcatcatatgcaatctcgaccgctgctggtgcaccgtgacaagttcgacccactggctcattgtatccaggcgtccaagcccatcgatataggggcctccttccgtgatcttctcgtttgacgagtcgagtcagcgaacgttagcaggggcacagctgctagcgatgtttggtacatcgaatgcggatacaaattggtatcgcgctccggtctacgttgatttcctgttacgggaattactggtgacgaagacgtttcatttcgccctcaccctagtcccctagactcgtctagatctgcgcgtcatgaccgacctacgctagcttgaacttttacacacgcatagtccaaatcagaatctacccaatgcgccaagaccggtgccgaaacaaaattgtgttgctgcctataatcaatgaaacatcttacatacaccaagtcaccattcgtgatgcccccatggctagcagttgcaaaacgtttagttcacgtcttctcgagatcgcccagaaccgatcggaccggtgataggggcatgtgagtgagcggaaacgcaggacctgcgaagcttcggtgacccgccattgtgcagagccaggatgagcgagccaaagctgactgcatgagactgctcaccgcaatagtagcgtttgttttgtgacgttctgatcgcgccgactcagtcgctcccgcatcgtagtcaatcgtatgccgggaaacacggacgaatcagtccgtcagggttgcaatgtcgggttggtacggaagtcgactcatcttgtcgtcctcgagaatcgtcctcgtcaataggccccggccatcaccactgacacgatagcgcgcgtgcgccacaacagaagaggcttttgaaatctacccagtcataaccgccatcgaaaaacgttcgcatctcgtcctcctgccctccttgattcttgaccgtcaagcacagcaaacctgcatggttcaaccctgaatactcaaccaggtgtctcaagggcattcgcgggccaaatgaccatgaccgccaacagcgctgcatcggtggctgcttcaacgctttcctatatgtcgaactttcaagcaccccattgctcgacgtggcaaatgtgatattattgactttgtctggtaaagagggcaatggcagctgccaactcgccagggggggtcacggcagccgacgaagctggacaaagtgtcgacgtcgcgcggagagggggaagaatgcttgcagcccctttcgacctcgttctcctggaatacgtcgccgtgaggtctcggcttcactctggactttcctctccaatatcgcctcgctccgctggaaatcggactgagtcaggagagaaccggacggccgagtggcagcggagccggatcgcggtgcggagccggatgatgatgtctgcggcgtgcatttcagagaacagccgtcagaacaatcagagtcgattttgactctggttgggatcactcggttgattatgtcaggacctgcagatgttcatcctcgtaagctcctcagctttgccggaattgttgaggggttcagaatttctcttcacatttcgcagtgtcatcgatcgacatgtagtcgtccgccgagccccacacgccgtctactcgtacagagtaggtggtcggacgtaatctgcttccgtgtgcacaacagggccttgtcccaccacacacttgatgacctattgcattgtcggatgaatcttcccccttacccctcaccccgcgcctttacgcctttatgcctttgcggatcgtccgcgcgacggattattcaagactgggtagcttggagagggcgtcagtatactgtcactatatgccctagttattcagatttagaaattaatttataacgaagccgggatcgtatagtggttattattttccactcgatgattgccgagcggcaaggaatcgtggattgaacacaggaccttctcatttcgatgtgtaattaatacgagtgagacgcactgacacgtgctacgccggtggagcagtagatcatgattaactcatgcaagtatggacagcagggtgttacaatgaggctagggagcgatgctgaaagcgattggaaaagaagctttgtcggtttttccattagatattatgtttactaaacaaatacaacaacgacgccggtgtagcacagtgcgagtgcgtctcactcgacttcgtctgcgttatgcccgcagtaaccaggccatcctggcagtccaacagttgtcggtcggtacgagcagtcgtctgcgtgaacatcgccattgagcatattcgtccggtacccgcagagagagctggctgtctgtgtggcgttcgccatcttacgcccaagcgcgcgcgtcaaggctcagctctaatctcgaccgggcttgatatcatcattccgacctcccatcatttcgacgctttcaactcatcatcagctagtatattcatgtcctttaccgtatccagactggttgaaacacctcattgatacatctcattgatacacctcgttgatgcacctcgttgatacacctcgttgatactacattatcgataacatgagtgattacggcgatatgaatgcagaattctggaatgaggcggtccaggtgcgtcctcttgataaatccgtcactctttccccatctaaccccgtcgtcccgttccccaaatcgtccccctgcacatcggacgacctcgtcgatttcccactcccctcccccctccccttctaccggacgacctcgtcgattcaccccactggacgaactcgtcgatttacccctatctcgaaatcgcctcgaaatggcagacctatgatcctctaccatgggaacaggagacagagaacgcagaggctgggccttccagggtgccggcagggactgtaagcagtagagatcctctgaccccctcggactgttctttgatggcgaccatctcatatccttccgacccgcgacgaactccccgcgacgaactcgtctctcgaccccctcatctcatatcattcgaacccgcgacgaactcgtctctcgaccggtacctggcaccttgacggcgacgaactcgtcttcccctaatctcctaacctcactcgcatctggaatggatcctttgacccgattagacctcgcaacagcccttcgaaacttacgatccgctactgtgggaacaggcagatgaggtggcgggatcgtttgtgacagtggaggacggggagtttgacgagggggaggttgacgacggggagtttgatgagggggaggttgaggacgagccggcacacgattccgattgtgtagcctatttggagcggatgatggtcgaaaaggaggggatttcctcggaggaatttctggactgggtcttctttgtccaggtacgaagcggaggatcttctttattcatcacctctcccggtccttactgttcgtcggcctgccatataggacaaagtcccctcacctgaagaggtggacgagcacgtcgacaaacaagatgagtttgaggactcgattaaacaacattttggtattgagtagagccagagtcccgagtgtagattctgttctgatttactggctgcttcgaacagggacggtctatgctggggtgatccgccagaatggcgtaccacgccaatctgggactatggcccagttgttcttcgccccggtccacagtgatccatatgtcctgacgaggaaaaagtcagtctaaaggcaaataacagtcgtattgaaaactgacaagtctgtccatagatacaccccaaggatgttgtgcgacaagggatacgacggcagttcaccagcccattgtgcctcggacttgtatcctgtaaaggtcgacgacccccagatcttgcagagcaagaaccttccatcgtacccgcatcggaacatggggctacagtggaagctaggtcatgaccgccgcaagcacgaggtgacagcaacccaggaagagatgtttcaggtgagtacattccgggggcgcactgtcaattcattgtctcatgttcattgcctggtacttctttcgatagatgggggtagatctgtttgaagaggacatgatagctcgaaggtggctgtaccaacgcctgctaagccactacagcgagctgattttgacaccgacacagcaaattcccctcttacaccactttagaaggatcctatctgaaaagcacgttcaagaatctgcctttggcacaggaactggtttggacggccatcctcgttgggaaaatccatgtgcccgttgcttacaagtgagtaacatcgaccctcgctcaggcgcctattttgattactgacactgcaagccgtctttattcccctacagaaatgacaaggggaaacttttgggagtgttctgctttgtcaaacacggatcctatcccaagtacgcttggagccggccagcaagcgagatcaaggctgaagggacagcaatggatgttgtcaagaacatcttgctgttcttgtccaacacccggaacaagtcacccagtcgttacgcgaatgaaggtcggggtggaggggcggcaaaggacacgggtcatcggaacctctgcgccttgagaactcaagagatgctcaccggacaagcggtgacctttgaggatctgtcccaagatatgcaggattatatcctacatggaggatttacgccaatcgcagaggtgggggaagatctccgggcctccaaagcaaaaaacaggtcgaatgccacctggttgtcaaacgtgctcgcaaatattcaaagaacaatacaagccaaacggtgagctctctacccagtgttcagtattcatattgccctgaatcctcctgtcaccgttgctgaatccttgcttctttcagcactccggcacaagaggaagcgagagtcatccgtttccaagcgaccatgacagcccgaccactggaagtccgtgcagctcagggcgccaagactgcagcgacgagggcccgcaacctcgctgagggaatcacgtcacgaggatccaggcatctaaccgccgaccacaaatccaagctcagcgtcgcgacttcgcacaggaatgtgcagaatctggtgaagaccgtcaaagtctacctctggcaaccgacgtcaacagaaaaatggacaatgcaagtcggaaacgagacagatgaaggtggtcaaacgatgaccgtccgttgcaaagagaatcttgcaaatgtagttttgcactcgtgaggctagaattgtccttaatgacgtgcacgccccgctaactctctccgaaccatcaggaatagcccttttccgctagaaccgtggtattgttacgaccaggacgtagtcttcgttaaaccgaccaaccgggagcccagtggactcatcttttggaggcagaacggatcgtcttattgcacaatgtgcaaggctgcaaccagtacgcagtgaaagaaccttataccactcgtatatgtataggcgccctatagctgacatctccttcagagagtgtagagaccctttgccgcccgttggccgcgtacaacatcatcgacaagaagcgcaacaaggaggttggtccgttgatggtcttctcagatcaaaagccggcgttggtattagatgatctggctctgcgattgtcagcacccccagaatcctgacctgtttgaaggattcgtatcatcgtccaacatactcgtagttgtacaaacagaaaacgatcacataatgatcggtcatgagctgtagctgtgtcggtcaatcggtggatgcggcctaccgcatacaatcgtccggacgataatggccagcaactcacgcgtgatgcaatgacagaaagacacttcccttcgttctatagcaattgcgctggacgtcgctgcgctgtgtattgtatgtgttggttgctctgtggtacaatctgatgagctcgtcatcgatttgacctatccatagccagatgtaccactcggcattggcgacgagctcatcattgattcgactttgcaaaccccttgacaatggcgacgagctcattgacgtatccctacattgacaagaccgtcggaaggtcaaggcctcttagagattgacgtcactggcccgccaaaggaggatcggtgaaacgagacctacacatgtcattgtctgcattgttgtattcgtacgaagacagccatcggaactggtcctgtgaccccaaacggtacaataatgattacctggcggtgcgaattcgtcgttggaggtcagagcgcatggacgggctcgtcacgaatgacaacgggaagcgcagtggagcaatcgaaggagatgaatcttgataccgtcatgatgagacatacgaatacagatagaaggtcggaccgaccaaccacaaaccgcgagcagagggagcctcccttcgaaacggtaaccgttctacggggcgggcgccccttcaacgcgattgaattgcacgggactagcgacgatggcgagacagggagagggaggggaccgggatggaggcagacagcaggctcacctgtccgaaccgtgaatgtggcggttgtgaatgaggctattttgattcgatatacgtcggtgacctggactgcaagtgcgaaaatggtgtggtcgagcggcgatcggggtcatggtgcaatgtgtttgataacggacgatggtcgtctcagatcaatgttgacggttccaagacgggagaatcggaatcagtttacgattgacgtcgtcgaacgatatgctaagctatatcaggtgaccagagtcgaaacggaacgataggcggcgatcaaatcatgtcgaatggcagggtcgatgtgggcgaggaaggttcagttcggaaggtgattgccattccaccgaagctcagaacgaccaccacgcgatccccatatgatatcaaaaatgaacgtctcgttggggtctggtcaccctcgcggagataatggtgcagggtatgtctctcgactccggttactgcaccacgctcattcgacgatccagtggaccgatccgggcgcctggacgcgtcattgtcatcaaatgggtatcgaaggtgatcgagatcgagtcgcagtgggtgacagggaaagagagggagggggggggtgaccggagaagaggaggtgaacgggttacagtcagagcgtgcgaggtggcgtggctgcaaatgacacatgactgggtcagaaatggagggactgaaaggataggcgtgacttacaattccgatcgaaatagtccgcatgagggcagagtggttctgtcagcgaatacgagtgcgcacgcggcgggtgattgacgacgcgataggaggacgtacggcagtgtatgatctcgaggccgcaaactcaggagggtcaagtacggctgcggtcaatttgtaatccacgatatgtatccaagatcaaagcccggtgccaggcacattccctggttcggtgaggaagactcgagacgattgcttctccccgattgtggagccgttatcatcgagcttatatacttgtcacgtctgacggcgtggacgcgtcgacgcatgagttgcgcttaacgaatgcacttctatcacgggtgggcttggaatgtccgataaatcatccatcataaaaacgtcaaaaagtaatgccgcagatgtggtttgaacacaggacctccacatttcgtagttagttgtacgagtgcggcgctctaccactgagctacaacggcttccatgtcagaacaatttcgttgacaatactatttgttaattccggtagcaaagccgccccaaatcccactcatcgcgatctcctgatcggtccttgcagcctaacgcggcggcactggtacatgagccgtatgggcggtttgcgggaagccacccggagaattcagaggataccgaaagcacgtacccatgctccggctgctaaaaacacttgtcatggctacggccgccatttggacgattgacccaatgcgtttgatccgtatcctcaacgttttcgagctaagaaccaggagcataggcttttcgcgacattcgaccagatggcgcgcaaccagtggatcagggagtacaaagctatgtgccaggatgagacttcttgccggtgcacctgtacgtgcaaggggtgggagacggctggaacatgaagaacctctggaaacgcccggtcatccaacgtgtgatgtgcgccggatcactcgattttgcttccgctggctgtgccagtagtgaccgaacggctgaccgccgagagctgcacgagattcttctgtgttgtatatctgtcgagatgtagtttctgtacgatcacaggctcgagcattagtcaaagtcttcccagtggattcttccatccatcaagatagctgcaactctggaatcgttccacgatggcgacttgtctatccctcatcacgacaacggacgctgtaatcaatcggtaaacctagaaagccgagaatcgccatcgagcgtcctactcggcgttgacgacctcgcaactaggaataaagtcatcagaagtgcttggtcatgtgtatgaaattgtcattacgatgcgattacaactgctcgcgcgcgtgctactccttgtcggtacccctgcaaccaaacgaaacgacgaccgggatgagtgccagcacgacgcaagcgaccggacgaaacgacctacaagtaccccgtcaacgcttctgacggtatgtgcttttcctctacgggaatctcgtgatcttcggcctcttcctccgagatcaatcgttcggcctcgagcgcggccatgcaacctgtatagcccgccgcgtcagcctgtgacctcgtttgcgacgtgggcgacgtgtgacccggcgacactcacccgaacccgcgctggtgatggcctgtcgatactttttatcctgaacgtcacctgcggcaaacactcccttgatgctggtctgggcggtgcccggtacggtgacgatgtaaccgtcggcgtcggtgtgtacctgttcccgaacgagagcggtggcgggttcgtgaccgatggcgtaaaagagaccgttgacatccagcgtcgaggtctcgcccgtcttgacattcttgatggcgagggattgaagcagatcaccgtcaccctggcactcggtcgcgaccgtctagacgcgggacaaacggtgatcagcgaccatgtcccctcagcactagtcggacgccggggctcacattccaaagcacggtcaccttgggatgacttgtcaaccgcttggccatgatcttgctcgccctcaactctccctttctgaccaagacgtagacgtgactcccgtactttgtcaagtaggtcgcctcttccgctgccgagtcaccacctccgatgacggcgaggggtttgttcctaaagatgggcactgcaccgtcacatacggcacaggccgagatgccgctctgccaataagtctcctcgccgggcaagttcaatcgtttggccgaagccccggtggcgatgatgatggtatcggccgtctcgaaatcggcgtcctcttcttccccctctcgccagtacttgaacggtcgttgcgagaggtcgaccttggcgatcgtctcggtgatgatggtcgtcccgaatcgctcggactgggcgcggaacttgtccatcatctcacctccattgacaccgtcggggaaaccggggaaattgtcgacatcggtcgtcgtcgtcagttgaccgctggcatggcgaggtcaggtcgtcagttcgagcccagcgcgggtggggaggcgtgcgctttgaagctcaccctggtgcgaaaccgttggccatgagaccctcgaacaggacgggcttgagctctgctcgtgcgaggtaaatggcggcgctatagcaaggacgatggtgacatagatgagcaaaagcttgacgatacgcacgcggcaccgagcgcagagccgactcacgtgtgaccggcaggtccactaccgataatgacgacctggctatgcatctttttgctcttttctccaccggccttgggctcgttgacctcgaaaggagcaccattggaagcaggaataggagccatgttgttgttgttgttgccgtcgaggttgttcaaggtggatgtgctgtataacgagatggcagcggtagatgctgtcaaggatttcaagggcaattgaggacgactggtgggtgcgtgccggaagctgtagataacgtcagctgcaatccacgacgacttgatcgagttggacgatatgctgacctcgacctgaatgcgggattgttgacgatgccggtgttgcgaagcgagcgttgaacggtcgatagcctcgtaaaagtcgatgagattttgctgacggacgccagtttgaaggaattaataccggggggaaggaggggcagtggaatcgagttgtcgtcgtcgagatgattgcctcgagattactaattggtgacctggtgatgttgcttgtactttctaacagctgatagatgcatagatgacaaaggtcactgatcactcacacatcctcccctcacctcaacccggtcggtcggtcggtaatccgcggcaagcgagcggccgaaagcggggcaaagggcaaacacacagggtgggtcgggtcacgccatcagcagtgcaatcgactcgaataaaagcgcatcagagggctcgagggtaacggcatcgcgagagattgacaagcgcatactaacgtctacttgctgcttggacagcctcgtgagatcgaccttgcagtcgtgataggcgtcagcgactatcgaaagactcgaacgatcgtaccgactagagtcctcgcagtcacattcatgacgacgaatcaaagagcacctagaggtggaatgtatcgctggcggtatagctcgtgcattgcgatcaccctgctcgtcctagcgagtaccttatcgcgtgattcgtcatcgttttgcgtccgttgacgataaccccaaccggacctcgccggtgatggaccatcagcgtgttattgatcattgtcgacgttgttcacccgtcccgttcgacactgtggtcatcgttcaacctggccctatctacgtatcttttgttcaaacgtcctgttcgatcgctagtcttcacttgacccaccgtctcctctcgccgaccacacactccctgcgcgtaccgcctcgtctttctcgagatggccgacgacatcctcaaagaactcctcaagctcgaatccctctcaaacccgtcctcctcctcaaagtccaaatccaagcccctacaaaccaccctctccgatctggagctcgccctcgagatcgcagagagccagatcaaggacgggatcgacgtgcaagatgtcgtcgagtcgctcatcaaggaaaccgagagcaagagggtggacgtcgataaagggttgaaagaatggtatgggggtttatccaaagtcgggaaagccatcgacaaggcgagtcctacaactcggcacgagcatttctagaccccgactgaccctgatctcgtaacctgggcatggggcgtcgcagggaatcgtgtcagacatcgccgccatctcgaatacgtacgacctgcccgccccgccactgttctcatctgaaacgagtcggagagccatggatggggtcatcctggagaccatggtcagaaagggagcttggaatgccgccgagatgctctgtcgagtgagtctgcctccccctgcccttccgatcaaacctgatgttttcgggtaatccccgccgacgcccacgctgccgctgacgtgatcgcttctcatctttcgacccgctggtaacaggagacgggcatggttttcgacgaagagatgaggcggctcagcgaagagttgcacgctaccatcggggacatgatgaagggggatgtcgagtcggctctcaagtgggtcatcctcacgccgatcacctcgaattgacccccgactgacccagctctgaccacgatgaaccgaccaggtggacgagtaaacatcacgactttctctcggctccgcctcatccctctcctctaatattctacctacaccgagcccgactcatccagctgctcctcacgccctcggccaatacgaacccacacagcgattgcccagcaccgctgcaatacgctcgggatcacctctttccctacgtcgtctcgtcacaccagcaagaaatataccacctcctcggcgctctcctctacacaccctcacaactcctcaccagcccgtacgcggacctgctctccccgtcactacagcctcccgcgctcgtgcccctcttcagggtcgagttttgccggcttcacggctgggcgagggaagatcccttgagcgtcgttgtcgacctaggagcgagtggagcactgggcaagattgacaaggcgagaaaggtcatgaaggagaggctgggcgaggtcaggacgtgggacgaattgccggtaagcccgtgtccgcgtcatcgacaagggacgtaccctaacgttcgacgacgaccggcactctagatggaactacctgtccccctgtcccgtcgttatcactcggtgtttgcatgcccagtctcaaaggaacaagcgaccgaggccaacccgcccaagatgctctcttgcggtcataccattgcccaggatagcttgaccaagctcagcaaacacgggtgagtcgggaatcgctcgtacctcgatcctcatgagcctcgctcacatcggtctttttcgtaggcgacgagctgtaaagtgtccttactgtccgcaagagacggccatcgcttctgctttgaggttgtacatgtagccaccgactcgtccgggtcgtcgaaacgagatcgggcaggggttgcggatcgactaatttatattattatgacaatcaaggcgacacggccattgcgatgataggacaaggatgcaccgggacattgatgccggacaggaccgaggcagcacgggtaaagcctgacgtgactgctgtgaaaaaggcttctaatattctcactgccgtcatcctcaccgccatgacgtcagtcttggacgcctgcctggacccttatcgatagtgccgggtaaggggataaggaccaggtgatcgacacgtctccaaggcgtcacagggaccacggaagatcctctgccgtgattgaattctcgcattcggccctccttgtcttccatgcatccccgcactccttgcgagtatcctgagccccaccccgacacgacctcatgggagcgcttgacgtaacccgaaacattgtcgatcttctcgctccgacgccacctgaaacgttgtcaaacttcaaagagctggacattgtagtcatccggatcagattccccgagccaaaactcgactcgagctcggacaaagtcacgtgttctcaaacatcgccctcagtgccggttgatcatgccaagatactaaataccccagccactcgagcatcagaacaatctacaatgccatagagtacagcgataacacatgtgaccacccgctgaaacactctcaatccctcttccccttgaccttcttggcagcgtgctcgcttcgcactcggctcttcttggccttgctcttgtccctggtgccgctgagtttcttgctcgtacccttgacatcgagcttgaccttgtctcgcttgttggccaaggcatccttgagctttgcagactgcttcttggccgctcgtcgtgccaaacgggtcgcatcggtcgccttgaacgcctttcgctcatccttggacagggtcgcgatcttgtcacccagcttggggtcgccgtggaccttgacgatcgggacgacggggactgcctttttgactggagtctttctctcgggcttgacaggcttcccattcttgcctttgacatctttcgttggtactggcttgatttccctgcctccgagcgcgggaggcaaggtcttgcacggctgaacccgcaaatttcgcttggcgtgcctcagcttggttgacgggagtgcgaggatttcgtcgacactttctcgctcctatcgacccgattgcggcaagtcgcgccaaagcagtgtcagttctggatgatgctatctaccgaaaatcaaactaccccgactcacgttgaaagcaacgtaaccaaagccttttgccatctgagtctcacggtctcggatgatcctcacgtccaacacgtatcgaccgcctttgggttccgagccgcgttccttttcgaccagggcttcaaagaacagcctcaggtcttcctctttcgcagcagcatccaagtttccgacgaaaagactgttctttacgtctcgtccggccgtccagatttctcgccgggcgggaagagtagactttccttctgccgcagcggctttggcgatgctgtccaaggtgggacggacggcatccaaacgaaggtgacgatcttggaaagacgagttgttgccctgagcgatcacctgagtagcggcttcatacgggtccatgatgggacggacattggcaggtcgatcaggtgcagggtgcgcaaacacgatgtatgcgttggcagacgcaacatccttgtggaactgatagcgacgaggcgatcagtggcgggaacgtgtcactataaacgactgcgactcacctctcccttcaaaaacgcaacctttcgcttctcgccaggcttgaaaaagaccttgccgtctcgctccgggttgtcctcgtcgtcccgctccgccgtccttctccgcttgctgcctctggcatcaccgccttcttcttcattctcctctcgccacgccttggctctctccttctcccgctgctctcggcggttctcctcttcctcggcagcagcagcgaccgctgggtcctcctgttgagtcgtaggggcagcgaacgcgatcgaacggaatcggatggactcgatcgatgcattgggcacgaacgaaaggaggtgagttttgagctggttttgaagcgactgcagttgggccatatcggggggtcagccgccaagagcgatacaaagcttgtcggcaagatccgcgactcaccttgcttttcaagacctcaaccgcgacgtttcccacaaagacagtacgcctgtctcgatcggccgaactctcgccctcgggcacgtatttcgtcttcttcacccttcgcttcttcttgtctggctttgatgcgtctgccgtcgtctcggcgacctcatctcccgactcggctttatcactctccccacccagacttccgttctcgccaacggcaatgtcgatcccactactttgggtctttgcggcatatcgttgctcgagcgtatcatcgttgtcctcttcatcttcctccgcttcagcaacggcagactttccggaagccttgtcttccttcttcttttccaacttttcagctttgctgagcttgggagggcgctctttctttccggccttcctcttgacagtaccgtcggcattgagctcggtcttgtctgcagcctgagatatctcgtctgcctttctcttcgaagacgtggagccttctgcagcgggtagagaaccggatgctcgcgctgtctctacagaaggtttgggagccgtagcaaaggacgcctgtgtgcaagcctttgaagttgagcaacgtgagaggactgcgacgacgatacgctactcacgctttttgcaaagatgtcgtccagctccttgtccgcagcgttcttgatggtaaacaaggacattctgatttatttgcccgtgtttgatttaccgtggaagagttcgggtcgagacagacagacaggctgatatgaaaaccactttgaatttactcttgatcaaaccctcgcctttgaccgggaactacaactgatcgcaactttattagcggacattgaccatcaccggatgcttttatatagttgacccggataaacaagctgatgtccgtttcgcgtgggcaaccccggggatcggctcccgcacagcatcaactacatcatcgcttcgaagggatcggtatgatagcaggtcgtactgtcgttgtttagaaatccctagctcaaagatccgggagaatacggaatcactacacaacataggctgctcgattgaacacaggatgccgtacgagaaaggtcagccacaagagccaggctcatcacgtcgttcaaagctgatcttgtcgaatatacgtcacgcaggatcgctctttgcttgcaaccctgctacccagagactggtctctaccaagatctctgccgatgccaagggagaaaaaatcgcatatgtcaatggacgtaccgtcgttgtaagcctgcattgacatgtactgccgatcgcagagctgggtgtaagccatactgacatcattccgctccatttgtgtgatgcgatcattcgtactcatagattcgtgacctgaacgtgagtcggaccgaacgacatgcatgaataatatcctgacgtccgagtatgattctcccaggaccccaccaagtctgtctcatactcccgtacgtcatccagctctcggatagccgttaccgaagtcactcattcaacttcgaataccgtatcacagaacacacccagccaaccaccgtcgcacgcatttctccatctgggttctattgtgcttccggagatgtcagcgggaccgtcaggatctgggatattgccggtaccgaccagactctcaagctcgagacaaaggccctgggtggcaaggtcaatgacctggcttgggacggtgaaagtaagcgtatgattgcggtcggagatggaagggagaggtttgggagtgcattctttgtcgatggaggaagcaggcaagtcctcgcggggtagcttatgggtatggctgtccgaagcatagctaagctttgcaaccatccgcagctgtggggagatccagggtagttccaaggtcagttcttatcgctcaagcctttcctagcccgagataaccttgcgaatgggctaccctcaggtcatcaacgctgttagcatcagacaccagcgacctttcagggccgtgacggcgtcggacgatgcctcgatcgtcttctttaccggtgtaccctacaagaacgacaaggtcagtcatggtataccagagcgaatccgcccgactccatcaaagtaactctgatccgatataatacaggtcatccgaactcacacccgattcgtgcaagatgtccgatactctgcctcgggcgatcatttcgtgtcggtcggttccgacggcaagatgttcttgtacgacggcaaggatggtagcactgtcgccgagatcaacgccagtcaaggcagcgtcgtaagtccctctcgcctgccaaacaggttcgtttgctcaagcacgctcgtgaagttggcggtttcatggtcaggagactcgaaacgactttcaaccagctctgccgatggcacggtcaaaatctgtcagtccagaactcggctcactctggttacaatgactgaagcccagttcttcttcgaatttcaggggatgccgagacaaagcaggccatccagacctacacgattggcaccgacgtggcctctcagcagaatggtaatgtctgggcgaatgagaactcgatcgtatctctaggcttggatggcaccctcaatgtcattgacacgcgtgtcgatggaaagtggaaccagattcacgtacgtgcactgatcgagagtaattccggagtcttgctttgacgttgattccgtactttgcttgttctcaaagggcgcacccaaggcgatcagtgccagcgtactcgccgccaagcccgagcctacgttctacacaggatcgtttgacggttccgtccgagcctttgacatgccctctggaaaatgttcggctgtcgaaggcagcaaaggcgaaggtcaggtgaccggcttcggctacgatcaaagcggcaatgaagggcaagtctggagtactggctggggctctgctggaggacttcaggctatcaaaggtggaaagcacgagtgcgttcattcttgcgctgactaggcggaagctcagtcggctcatcgttgtcacgatcgcagcccgtcaatcgcttcttccagcgacattgacggatccaaggccatcgccgcatctgctggcaacgtcgcagttgcggatgtgtcaggcgtcatcttgttcgcaaatggcaaaaaggtcaacaccatcagtatcaaggacggctgttcggcagttgccttgaatgggagcaccctggcttacggtggagccgtaagttgcatctgttcctgtaaacacgcatcaaggctgacgtaccggccactcaaccaggacaagaagattcatctcacgaccacggatggcggctcggagaccgtctttgacgactctagaggagaactcatttgtttggcgttctcctcggacggcaagtatcttgcaggaggcgacgtgagtgtcacagacccaccggtgcagtgcggacgcaacggctcaagggaattgctcgcagacttctggacgtatcgtcctcatcgacgttgctgagaaaaaggtcagtttacgcgatggataacgtgggggcctcgagctgacacgttcgatcgcttccgactgggatcccagacgatcgtctcgtccaagtggaccgcacacacgagccgggtgaacagtctaagcttcagccccgatggattacgcatcgtatcaggcggtctcgacgaaagcatttatatctggtcggtgcaaaagaccttgcgaaacgtccctatcaaggtgagaactgctgtgctctgcgtacagcacgccgttgactgatcacatacccgcaccagaacgcccatgcgggaggcgtatccggagtatcctggttggatgaaaacaacatcgtcagtgctggtgccgatgcatgcgtgagaacctggtccgtctccgggccatgattctccgttgccaaacgcagacacggcggcgtccccgcgtgcaacccgggatgacgtgcgatggaacccaagcgtaaacgcgacagaagcgttctcacgcgcaagtggcacagacttagaacccgggcttgtccgctattggatgaccgctctacgctttgacaggtgattcaccgtcgatgtatcttcaattgtaatcgtgcatcgagtgacttcggaacatatgttatctatcagattgcgtggttcgatgagaaatagcatgctgcttgcattatagtcatagccggacttatcatcaggctcaacaatacaagcgtcgcgggaggtacgcttgccgtggccggattaatatgggtgtttggccgaacagagcaggtaggagcgtccaagcgtacatccgtcaaatgggaggcaagaatacttgggaaagtcgttcgtgcgacgagtcgggaagctcgtctgaagagactattgggagatgggctcgcgagacaaggtggccgcatgggaaacgagcaaaattctgagcgccatccaggtcctcaagattggacgggtcgtcgttggatgacgatcgagacaccgactggacgatcatcgggggagatcttccgcagttgattgcagtcggactgcaacgtgttctgttcacggtcataccgcgcgcgggattcgcgatctgtttcatcttgaaccggcccggtgcgagacaaacacggcctgtcgtgagttatgatggtgccgatagacgacacctggcaaggaaggatcgctatgagagacgcagggaacgctgggactcttaaataaggagttgatgcagctgggcgcacgaatgggtctcgtctcagccagcctaaggaaaccactatctcggacggtttcatgcccaaggtgcaatcgtaaagaaggaagtacccggattgccaagatgacgtcgatttgaagtatgggggactgtacgtacctttacgggctaccgacaggccacggaaagctgtcttgataggaggcacaatgatatctcagctgcgatatataaagcgggacccaaatccaagaaatctgagcgacactcttgtcgcaataaaggacggacctaaaaaaaaaccaagcgggataagaccgcatcttttaagtataaagtcgatcggcatcagctgatgaagtgaaaatgacgtcctatgtaagcttcgcctccattccttccttcaccatgatcgaatcgcagctcactcccttgtgctccttgcgtcgcgtaggattccgtcatagccacggtgaatcagaaatcggacgaccagcggaaagcgcttacgtcgaggaaatgaggccctagatcgcctcggataccatggtatgaatccctattggctttggaacgaacatcacgagaccatttcacgccattgataagcgcttacttgcgcaccgcggataagaaggcgtctttgcgcgagaacgcaatatgctcctcggctaagctggtcggaggaacgcggcgagtcgatcgaaaattttgaagtcgacatggcgaaacaaaactcaacgattctgagcgatacaatggccgcagcgatctgggattttaagaggggccacagaggagctttacaggtgttcagaaatcggattgacctgaaaaaagccccgtcccagagtcgtcaactgcaagataatagaggttttcggaagagggaaagagccgtatgagagcatcgtagcgagggtcgaaccctcgaacaatgtctcgaacggtgaagggatggtagagtcccgaagcgatcgatcgaccagcggccttttcgcaatcgggtaaaattaaaaaagagaccgggcacccgcgttcggcggtcttcccagaagtaccggattcctgagagagtgttcgcaacgggattctttttgtccacggaccctcaaaagctgggcggacgtgtcgaagaatgttcccgttgactcgacaacgctggggagcgatgcgagaagccgcggtatagaagggtgctatgattcaggtcgctaccggtcgaacggcgagagaaggtttggttgccaaaacggctcctacccactgacgtggcgtagcagctcaccgcatcctactgctctcctgggagtcggcccttttgaaggggagcaagtggtagcataaccgaaaggcccactcacgcgaggtgatcccttgtatacgcgccttcgaacgctctctcaatcatacccggtctcggaataacgttctcagaaaggggcggcgattccaaccggccttgatgtcgtagtgaggtacggcacgaagcaccctcaaacaacgaccggtggcgagaggggagacgggggtccagaagcagtcgacagatctcgttcgcgaaagggaaagggcgagcggtccgatctaacgctccactcactcgatgcccgatgcccagtctgttcccctgggcttacttctacgtggcggccaagttaagtcggaggaggagcgcccagatgtatacccgacctgtgtccaaccctttcggaatcggaggtctgtcgaaatcgagccgcttcgaacttctcgcattgttcgcctctccgagagtagaggctagcagcggagaacagtattcaaagctgtgcggtccgaaaggattcaagctacgtggagctggcagggccatgatcgtggacagaggagcggtcctcgtaggcgccgtgaagccacctccccaaggggtatcgatgtgctgcgatagcttggctcgcactcgtcctcggctcccctctgacaaggaatgaacggattcgaccaagcgacggactcaccgttccgtagaagagggacgttgatgtgaacctgcgagcaaacagacgacagcctgtctctggggatgtacgaaacgagtggagcgacttgcctcgatctgatggccagccggaaggaagtggatcgaggcgattagcggatcagtggatcagcgaaccctttgacatcaaggggatcacgaagaaggttcgactcacttggattgagatgctttggcgatacgggatcttgatcttgaggagaaggtggtgggaggaagagttgatgtgaagaggggaagaggggggcgaggcgaggcctctcggcccatatagcctcgctcgctggcccatttggtggcgaatccgctgccggcaacaccacaacaaacaaacagacaaacgtcgtcataacggatttgcaaacgagccgacggcacagcgcgtcatcacgtcggcacaggggtggcacgctctccgtcaccgtccacgccaccgacaacatccttggctttgtagcgacgaccccgggtttcgttcgaacggcaggaagagcagaaggaatcagaaccatccaggggccaggggtcgaggaacgtaattgctaggttgtacatggtgagtgctccctcccctgccccacctgccttctgttcggccacgaccatactcgtgggtcgatcttccgttggcttctatggctttctgatttctctgcgttttctgcgtaggcttctataatttgttcctttatagcatattgggtttcgaggcttgcggaagcgggtttgtgcggatacaaatcccgactagtaccctatccagacgaatatataggtcgaaccggtctagcccaatctcttcatctcaacccgccgtctcttccactctctcacacctccatctacccacaagacctctgacgatacccctcctctgacgatacctcagccgataccccaacctccgacggtatccaaccttgtctccttgctcttttgacgatacccatctgtaagtactcgatacgaccgcctcttcagacacttgctcacttctatcattagcagaccacgaccacgttctctgcgacctgcgacacactcttctcccccccttcttcacacacgaccgcaacggacttatatgatgaacgtaaccgaaaccgatatcgacgaatcgaacccctgggctgatcatcccgcggccgaaggatcgagggtctgtcccgctgagggatcggagaaggctcgcctcgccgaaggatcgaaggccaccggttccaaggggtcgaagggaaagatgcagaagcttgcgaaaaaggtcaccaacttcaaagatcgcatcatgccaggcaaggaccgaaaaaagggaaagccaaggaagaaatcacgggccgggatcccccacggtactcgttgcgcagccttggctctccatcctcccgttcggcacgcccttcagtaacctccccttcggtcgcctctccttcggtcacctgtctggtccctcatccggcgacttctccgctctggcctccggcctcgatcgttcctccgtccccgttggcgacgcccgaaccccttctggagcgcgggtctccgctccttccgacaggcgctccgctcgcgatacctaagttcaacggctggggttcgattcacgaggatgagccctataccctcacggtccgaaccttcgagaggaaccatttcttggcctgctgcccccacagccggtcgtcaaagaagaccctcctcgttatcgccgggttttacgcattcctctgcaacccgtctgaatatcgtttcgacaatcttagggcgactacagcggaactcttcgacgagatttgaacgggcactgagatccgtttcgagacctttagtgaggctctcgaatgtccgtcttctcgctggccgaagaaacccgtctgtgcggtgataggatatgcggaccaattcgcgtgggccttgaaggcgtttgtcgctgacgacaccccgttcacgagggcggggctcgtggcggcaactccagccttcttcactcgggttgcggctggtctcggcctcaacaaggaccagacgcacgacgaggccatcatttgtcgtatcgagttgttgaacggccgggtcaacgtcgagaacaaggatcccttgccggaagagaatggccgagggcctttgcggaacgagaagccaagccggtcgcacgagggaatagtcggatagtcctttcggcgatatttgtaatcttcatcgtattttattcgttgcgaatcatcatatgtcgttgtgaagcttggccgttcttgtctagtccatcttgattcggttgatcgatcttcagtcgacctcgctcgtgatccggtgtgtcgccgcgtcatcacggctttgcgagatctcgcgagcgacgtcgagaaggatctattcagttccgagccattcgaaagttgctgacggacgttgacgggatctcaaggcagccggcatacacattgactctagcctacaaggttgaaatagttcgatttggctttggatctcattctggagaagggtcgtagcaacactcggggcgagatcgctacacgtcgatgacaatgttgaggctattacagaataccagcagctatccgccgtgcagcagcttgtcgatatgcaaatccccatcaaaagctttgatccagcgtgccgctgggtttagtcgaagtatccacagtccgaggagactgtaccatgcgagcggtggacgtctggacaacaacaaatggaatcctcgaggtggaccttcagggaactcgcaaccccctggcgggggtcgtggcggcaacggtggaggcatgcagttcccaggaggcatgaaattcccctccggaggtctcaagatgggccaaggaggtcaggaagccaagggcgagacgcttaaacaatacgtgagtgattgggctacaggctgacctgcacgtcggaagatgacagcctgacaacggccgtcgatctcgtactacagagtgtggacctgacggaactggcacgtacgaatgctctcgatccgatcattggccgggacgacggtaactcgctgcctctctgtttgctcggtcgattacctgctgagatgcctctgtacttgcttagaaatccgacggaccatccaaatcctctcccggaagaccaagagcaacccagtcctgctcggatctccgggtgttggcaagacggctatcttggagggtctagctcagcgtatcgtgaacaaggaagtgccggaggtgggtctcatcccgggatgagtcacacgatcgagtgactgacacgtaatccgtcaagaacagtcactgcaaaacaagcgtcttcttacgatcgacctcgcgtctttgctagctggatctgggattcggggtcagttcgaggagagattcaagagcctcctggccgatatccaggaagcacaacaggatgcgagagaggaaggaagtggaggtgtgatctgcttcatcgacgagcttcgtaagtctcggcagtccgattgaggtagtccctcaccaaccttccaagctgagatcccgcatgctacctgcagatacgcttctcaatcttggcaaggcggagggttctatggacgctggaaacgtaagcatttatcatcgtgttgcaaccgccaacctgactgacaccacgccttgttcgcttcgttaaatcagatgatcaaacccgctttggcacggggcttgcaattggtcggcgccaccactctcgatgaataccgcaaatacatcgagaaagaccaggccttggctcgtcggttccagccggtcatggtcgacgctccgagtgtggaagctacgatcgcgatcctcaggggcatcaagccgagatacgagagccattttggagtacagatttccgatgccgcgctggtgcaggcagcggtctactcggataggtacatcaccgatcgattcctccctgacaaggccatcgacttgctcgacgaggctgcttctgccttgaagctgtcgcaggaggtgagtcgagatggatcctcgctttgtgccagaaagagactgacctggatccgacccatcgcacagtctaagcccttgaatctcgaagtattggaacgggacatcactacgttacagatcgaaagggaatccctcaagaatgaaagcgacacgtattccgcggaccgcctcaagcaggtagaagatctgatcgaaggcaagaaagaagagcagcaacgactcatgaccatctgggagcaagagaaggctcgcgtaaaggacatcaaggatgtcaaacgccagatcgacgatgccacaaatcagctcgacatcgctcaacgagagggaaactacgaactagcgtccaggctgcactactcggaaattccagctctcaaagcgaaactacctcctgagaccgccggagaagaagtggaaaatgaggacatgatgattcgtgatcgactgacagcggcggatatcgccagggtcattgctaggtctaccggtattcctgtggaaaacttgaagcaaggcgagacggaaaagttgctgcacgtaagccgaaccaaaacaccgtggaagactgttgcttaaccaccttgttcgtgctggatagatcgaagacgctctgaagaagcgtattgtcagtcaagacgctgccatcgaggctgtcgcgaaggctatccgactgtctcgagctgggcttcaagcgccgaatagacccctcgcatctttcttgatgcttggaccaagcggggtcggaaaatcgagcttgacaaaggcgatggccgaattccttttcggggatgaacgcaaagggctgcaagtcacggatgaaatgctcgtgatcgtgaattagtctgatcccgcctgacatttaacacagtatccagatcaacatgtccgagctgagcagcaaacatgacgtctcgcgtcttatcggagctacggtaagcaaatgctttgcaaagagaggactcgcatctagctgaacctcgagcttgacttcattgcatgcttcagcccggatacagtgagtatacgctttctgacaaccgatgagatcgacaacacctactaacatgtcaaacgtctgcagtcggctacgaagaaggcgggcaattgaccaacgccgtcaagcgacgcccttatgctgttgtggtgagttacacctttgtcaatggttgtggtcaacctgtcttacgctcacgccctcctcgacaggttcttgacgaaatcgagaaggctcatccggacgttcagaaccttctgcttcaaatcctggaggagggtgaattgaccgacggtcagggtgccaaagtcagttctcatctttcagacaaggttggcgttctctactgaatgacacgactgtctcctcaggtatccttcaagaactgcatcatctgtctcacgtcgaatctaggagcacccgaattcctcaagtccggggcaacgaagcagggtgtcgtcacgccaagcacaaaatcagcagtgatggaatacgttaccgcatggttccgccctgaagttcttggtcgattggacgacaccatcttcttcaacagccttccccggtcggcggtcaatgatatcgtcaggctcagactttcggaagtacagtctaggctcaccgaccgacatatcacgctcagcgtcaacgaggaggcgattcaattgctcggcgatcaaggctactcggagcaatatggagcacgagcggttgcaagagccatacgcgatcaggtagtcgccaaggttacgctggctctacttgaaggacgcatacggtaagcacagccatggtcatgtttgcctcctgccgatcctgacagtatctcgatctatcgtagcaacggtgacaaggttgacgtcgttgctgacgacgggaagattatagtcaaagacaaccacgagcgggacacttcgcgaggagatcatgtaatggacctagtcgaaaatgaaagtggaagtgacaacgcggactcgaacctttcactgtcaggtgacaggcggaggctacctatcttggtagctgaaattcctcgacacgagtggtcggccaaaacagatggctccaccgtaacgattgcctcggagaccaccccaggcagtttggtactgccactcaattggttgcgtgacaattgcgcgtgctcactatgcttgcaagcgtcgacgaaacaaagactccataaaagttccgaccacttttctccaacggcattaccacacactgccgtctcgatcgaacacaaagacggtcttgccggtcttgccgtgacttgggcaggagttcacagtactgcgggagcgggaacgggagtcgaggctgctcacccagcgtccttcttcccccttgaagaactcgttcgcgtctcaagcccttcgcctttcactcgacaggatcctctgtttttcccgacttcgacctggaacaagcaaaaattgctcgactcgccgactctgcgcgtgccgtacgaggaattcaagtcgtctccagcagccctacacgccgctctcgcacaggtgacttcctacggcctcgtagtgctcactggcgtaccaacggacaagaccgaggacgcttcatgcgaactccgagcagctatggaacagatcggtgaactgcgcaacaccttctatggccagacatgggatgtcaaagcgatcaaggacagcaaaaacatcgcttataccgacgtggatctagggttccaccaagatctgctgtgagttgccgcagtcactttctggagctgtgtagagcgcaaactgatcaccttagttggaccgtagatatttcgaatctcctccccgatttcaagcccttcattgtctacgcaacaaggtcgatggagggtcttcgtacttcgcggacgcctttgccgcagcaaatcgtttgaaagaggaagaaccaaagatgtatgaagtcctcaagactacccaggtgccattccactacgacaacgatggcaattggtatcaccggacacatgcgacgattgaggaatcgcaaaccggacggggcctccatgcgatcaattactcgccgccgttccaagcgcctctcgctctgaacgacaaatcttccgtcctaggcctgccgggcggggcatcgaacgacttgccagcctcgttgactgccttcgatgagcttctcggcgacaaggcagcacaatatgaattcacgatgcaggaaggggatctggtattctttgacaatcgtcgagttctgcatgcgcgcagggctttcaagccgaaaatatccgcgcaggatgccacggtcgtaggggaggcaactcgatggttgaagggttgctatctagatggcgatgtcatatggaacaaattgcgacacctctctagagacggggtgaacggaagattccccgttgacgagcggtggcgttcgacaatcgagaaagcgttcccgaaagtataaattgtatgctcatgattcaccactcgcatacgcagacagtgccattctacaacactgctctctcttcacacgttgtacactagcataggctcttcctcttgtatcgtcacactgcattgtcatatcatcgttattttctagaccagggaatctcgtcctagaatcgtcaaggcatgtatagtcgttcgtatgtgtcgctttctctgcacgctcgtctcgcttccctctcgttggatgttcgctcttgcgtatgtatacctttcatttcagttcaaagaccctctatagttctgcttccattaagtcgccttcgtccgcatcgtcgacccgatgttccaaatcttcaatgtcggtatcgactgggcgacaatcgcagatctcgctcatgcgaccatctcgccgaagaatctcgaaagcgatctgagagcctttgcactttgcggcgtgcgcgtgatcggcgcctgccatagcgatgacttcatcatgcaccaacaccttatacgtgtgtctggcgttggactcggcttcagtaccgtccgtcctgacgaagcggactttctgacacttgtatacctgacggcatttccaatcgaatccccgcgtcagaatcggaccctgattggcacaagatacgtggtcgaaagactcacccgaacagcccaacggatcagcgtagagatagggtcaatctggtttgcgtgtttcacactcgcaaagaatggcgccaggatcggtccaaggatttccgtgacaatgccaacattgtagccgcaatcgataaagatagctccgcagaccgcttcgaaaatatcggcgaacagtttagaaggatggtaatcccacagttcctctaccatcttgtcaagatcgatcccctcgatttcttgcacgtgcagatggatcgtattccttagagccgacgattcgtacagcagatgctgatgcagcttgaggatgcggacggacaggtagcccagactcgcgttgcaaacaaagaccattttcagccagcttagcatgccactatctgcctttgggaacgcgtgaaagagttggctcatgaccacgaaatccaggacggctaatttgtccgaaagtcagtacttagatttcaagtgaaatgcgtcgaggactcaccatcgccgagaaattcaagcctctggtagggggagatgtccgatgtacaataggatgggtgagtcactgacgagagcaacagttgcggataattgaagctatatcctagcttctcttcgagacgagctagatcgagaccaatgcgttggttggtgtcaaggggcatagcgccaggtctctcctgccaaggctggatcgagccgaaacaaaggccaacagcctcgccgatcttgagggcagttgggaatcctccggacagataggcagcgcccagaagtgctgcattccgcagaccttgtaagtcagtgattcgagaatgtcactctttactcaccctcaaggcagtcttgcatccatttgcgcttgaccgttctcgtcttgacttcatgggcgtacggtgggctccatttcgcaatcatgacagcctccatgcacataattgatcctagtccagcgacgtgggccttgttacggaggaaccggttacagaccgaatgggcacgtaaaggggacagtagtccctcgtgcttgaatgggtattcctgatagaggaaaaccgtcgtcgccaattgcaagacgcgatctcccagtgtctccagccgttgataatcgtgaccgtaaacagcagcaggaggagataacgcttcgtgtagtcttgcgagatcgacctgatccgtaccgatatcgatcgaaggatgctgaagtctgtcatagtccgtcatataccgcatgatggaaggcagtagctgcatcccattacttagcaacgtagaagctttgagtaatcaacaaacgtcaggcgggctactcaccatcaatgattctctaacgctcaaaggtacggtcgagagcctgacaagcttgcgcggcaagatgaagcgctgtccttggggatggcctttcgtacggccgtgtatgccatcagcaaggatagcgtgttgctggcttaccaggttgttgcgtcgcctccgtaaagagaccacttgcaacattgtctggtcatcgctctcgagcaattggtaagacccagccatgtagctgagcttcttgtaggcaaattcttcgtatgtagcaaacccctgttcccgacagagcacctctccatttggttgtaagacgggtatagggatcgactttggggtcaagttgggcctgacgcattcgatttggatctgccgaccaaacgagtcgaaagccagatgtcgaaacgcgtctgaggaagtccatggtgtaacggcgttcccttcggataggcagcgaatcaactctgcgtccaagttgccctttggggtcaagggagcgaacagacaggccatcttgccttccaaaatgtaattgggccggatcactcgggtcataactgtttccgaataccgctcaagcgcctcgagggtctcggacggtgtcgatccgataagtgggcgtaatgcgactccggacgaaacgctgaccgcaacgctttcctcctgatcgtcacggccaacccagaggtggaacggcaagttgcctaccgagatttcacgcgcagcgacgattccaacggttgtcagaccatcgatggcaattcgatgcaagaagagtttcgcgtccttgtcccagatatcaccccaagtgaactggacttcgacttcgaattccaggggcaaatcttcgcctagttgacgacccgctccgtcctcggcgtgatcgcccttcttttcgcggtgaggcaagaggtgctcgttcaacagtttgtatttccacagggttttggcagcctcaaaagcgacagcacgcttcgcttcggctttgctcgtgcgaggtgtcccgtagaatgacaactctgtctttggtaagggcaccgcgggaggtaagcgaaggttcgcgatgaagtaacaggggtttccatcagacatggttgtcgtcccctcgtatgtgggccggggcggtggcacgcccatagcgtgaggcagcagggagcatgtctgctccaccaaaggtacggcaccctcgtacgtcaggacagccccagtttcggtaaccgtaaaagtctccctcaatgcctggtcgtacgcgctgatgtgcgcattgtccatgtcgtaagctggggcttcaccgcgatcatcgcgatatacctgattcaaagccggttctgatgcggtaaagcgctgacagaacgtagtggttttagcgatcgagtgtggcagactagttcaggaacccaagctattcactttgtaattttcgatctcgaccggctgatcttggttcaacatgaggatgaatttcgatttctggtgtctggcccttccccggctctggacataaccgatcatggtttgcaaagggtcgaagcggataaccaggtcacaagctggaaagtccaagccttcttcgcccacgctgattatcgagcgaaaaaggtatgagagctgattgcattaacgatgttcgccagaaaaactcacgctgtactgatgagaacgttgtactttccgtctttgaactcttttactgtctcttgttgctgcttgaagtcctgactctgttcttcaaggcatttgcgactgccgtgacccactaacgtctttaccttgagccaacttttaagatcctcgacccgctcgagcatccatgagagtccgaaagcgatatggcgttgcactacaaagatgatacactggaagcccgcatcggtgttcaagggggcaagcgcagattctctatactgaatcaggatctgaacgagcttgcaaatcttgtttggcaaggctgacaccgataaggaggttggcaatgaagcctcagtctgcttgattgctcgatgcgcttgttttatgatgctcagctggcgatcactcgtgtccggaagattggaggcggctctgatgatcatttcgatcggcttgtcatacagttgacccagaaagtagtcgattcctgcgggaccaaggaccttgcgagatacgtctgccttgacagcgatactatcccagggcgtatcggcagtccctctgaagcccatctctatgagagcgtcgtgtaatccgccggcctccggaatctggttatcgtgataatactccaccttttctacaggtttggaggagaaaaactccaattcttcgagattacatttgacagcgatgaccgacgcctgcaggttcgactcgagttcttcgagactcttcagtggattgaccgggttccaaatcggactagcggttaagccgagaattttgggacgatcccggcctttaccgacagagtggtaaaagtgcagcagtgttgtattgagcgggtgcttctttcgcgcatggtggcattcgtcgatgatcagaaggctgcattggtccatgaagaggtaggcgtgcgcgaggcagttgtagaagatttgaggagtgcagacgatcacgtcggttctccctatatccagctcctttagccattgatcgcgatcccagaaatcgacgcccatctcgccgcaaaagttcttcacattcagcttggtttccgtcctgataaaatcgctctgctgatagaccagtgggacagagggcaccaagaatacggcgagctgaatgaagagagatcagaataggatggtcatcatctttttcaagcatattgcttcgaagtgagatcagttcccgctacccaccttcttctggtccaggcgagtcatttcggcgaccatttccttgatcagcagggctccgatcaatgtcttgcctaccccggtcgggagtacggcgatgatgttcctcttgcatgcttcttcaaggatctcttgttgatacgctcggggcacggtaggtggcagatcaggctggccttcgtgattgataaccacgtctatgagatcggggtcttgcgtagccgcctcgatagcccgatccaggaaattgcgatcatcctcgacgtccatagcaacgacgtcgggcattttattgatacagccgtgtgagtttgttgtgtagatagttcaatacagatcacatatatcccagcgaatatagtatcgggacctagacctgtgccatcttcgcaggctcttttgaccctaatgtatgttcatatcctcgtggcagcgaaacgtcttccagctatgatcacaacgtagatgataggaaagcgacaagctctccaaagggaaggcgacgtttcgaattaggacaagagaatccaaacaacaaccatccagaagccagaagcaaggttgatcggttaaacgagagcatgtcactagattagcttccgatgcccgatttcaaaagcttccgtctcgcccgccggccggccgcaattgcacttgaccatatcggtcccgttacatcaccaggtgacgctgtgaagctcttatcctttccgctctttaacgctataatcgatagcccatcgaaccttgctacatagcccgtcatccacagcaaaggtcttacaggctcagctctctcaagtccggtcatcatggattggtacgtcaactgtgtgctaaagacgtgctcatcactgtctagtcgtctgatcatgccgtttccttgtcagcctcgactcgccagacctcgagctcttgattctcaaggctttggcgaataacctctcctctgctgattcaaacgcttctaaagaagatattgataccctgaccgcaggcttgccggccgcaagatcggaatcagacggccagctatgggtaagccaaacttcgacctcgaaccggtaccccattcactgaccgaaggcgtccctcgggaacatcgtaggaccaaagcaacatcaattctgctatctcctattgcaattatgtcgaggctctttcctcgagctctgacaatctctcgcaatcgcttcctcacttgaagcagttgcttgatgatgccaagcgagggttgcgcaccgaagacgcgtcgagtagtgcaggacagaccggttagccaccggactctcttcaacccggtaccccgctgtctttctaacttcgctccacttgctagtcaatctggataacattcgggccgtaggtcaagcgctattcagggctatcgctcatgtcggcgccgctagctcggaagcttccagggacgtcatcgacctgctctgcgaccatctagcggaagtacgcgcagatatccatagtccgaatgagagcgagatgggtgagcacattggccattgcgttccgatgattccgtcactcaatgtgcttgctgtcagctatggcaatcatcctactttccaactatcacgactttgtgctttccacaccgctcgtgcgcatctcggatcaatcgctggtcaagctgttgatcgccagtcacgatctggctattcctcctgggagcgacaatctcgaagcttcattgtatagctcccaaagtggctcacccgtctctacatcggacaacgatggcaatatccgtcttcccgccacctctagaggccgcatcgcaccgggacctcaaggtttagaattgcaaagaagcgtgatccggcggttctccaaactagaattagctcggaaagtagttgaaatcgagagcacgttgatgagtcaggctttagttggacacagcacaatcgaagaacctgtcctcttgggccaggcggaaacacttgacctggatcttcaaccgggcacgcgcgcgttctcgctgctctcatctagagccgttcctgagtccttgagtgtcatgcaccttggatcttatcatagtaatgctggcagagatgtcctcgagagaattgccagccaagcagtggcgtggtgggaagacattatgcacggtcagggcatcggcatcggtcacggtttgatgcatggtcggaaccggtcggacggctttgacgagactgaggttctagctgtcactgccatcctggtcagtacatcaaatactgtgatgtggtctctgagttggcgctgaagtcgctccctctacagaggatcctcgtgttgagctcgctgcatgcggagcaagtggacgacgcacatcttgcccggcttaaactgctgcttagcgataaggctccggttcagcacccgagcataatcgaagtcgctctctgctgtgtgggcatattggcgctcaagtgagttcgctaggtgatcgtaggcgggtcagaccatctgatagcggtctttaataccaaaagcttcccttacctcggtactacgttgactcaacatgtcaagcgctttgcgacttccccgttgccaatgttcgaggcagagatggcaggtactgggaccgacgtacccgaggtcatgactgctacggcccgctgtttggccatatgcgtcaaggtagataccgagaagaacacccgtttccgctttcccccgctcacctgactttgttggtccgccagactgcaccgaatgacgatctcgtcaattcgaccttatactcgctcatgcacacggtccctcatggcacttcgatgctggatgccccgtatgcacctaccatacgttcaagtgccgtaacatttgctggcctcggcgagaaagaaggcaccatgcaccgagggcggatggctgagcagacgcgaatgaccagtattagcaccatcgggatggtgtccaaactggctctcgccatcgacaggccagaggtaagcaaagggacagcgcaatgtgaactgacaccgctgacctttttgtatgccggacagagctatcaagtgacagtcaacatgctactacagcggcttcgtggtgccgatgccatcaccgaggcggcggtcgttactaacatcgtccctttggccttacgcgcatccgacgctgtcttacaagagtgcatcatggcattctcgtctatatcacgctcgtcgaaccccgaggatcctcgatattcacacaacgctgtccttgccgcccagaccagccttgctcgagggttcaccaaaaagaacagcgctgctggacgtgcgttcctggaggagatgctagctctgttcatcgacaaaggctcgcaaatccagactcaaagcgtgtctcgtcatagcaaagagattgagaaggattcttctggacgcgtctctgaaatgacgtcgcagcttgcagctctactgctccccatcgacgcagtacttgccaaccctgcgtatcccagcgagggacagtcttcacccgaactcgtctcgagctttaggaatatgtggttcctttgcacactcttgggcttgacaagtccgaggtccccgtacatgacggagttgactcggttttccctagcgcgtatcgctgtcaggacccctgctctggtcctcgaggaagaaaaagactatgcatcaagcgtcttggagtacaattcagttttccggcgggactatgcgcaagctgtaagcctgttcttccatttcgatcgagccccgctgattggcgtcgtctaggttgttgctcgacaacggtcggcgttgggcgcagcggtcccaaaactggctggtgacgtccgtggtttcagcctccctcaaaccattttcctacaaacagtgcacgacctcgaaacgctacggatacaagctgatcgcccatcggttcacctgcaatatttcgtcaacgcttctcttaacgagagctcgctggccaggcccttggagctcatcgctgacaaggcatgtcctcgctgtgaccttggtcgatgacgttgtccgctaacgattctgagcgccatgtgagcagcttcttcgtgggttcctagcccgcatgtctgcctcggtccttgagcattcaatggatggaaacgtcgtcagcgaggaggtccgtcgacttctcatcgcatcgacacaccgctaccggaaggtccgggaggttgcattgaaacatcttgacgcaatcttgacgtctttcgctgcactcatgtgcgatcggcaaatcgtctttgtcctgcttgagattcttacattgttacgccgaagttgcgaggatgtcttcactgacgaggttagtatctccgatgcatactgtactccgattggactcgtaagcttgcacgccgctgacgcgattcagactgtgcacacagtactcccctgtatatcgttatctttccgacaagatggacctctgtctggaaatcactgacgacttcgctgcccgcaatgaaacggtcaagagattgtatgaacacgcgtgccgatggctcgacctagccattggcagagcacctatcgaaatgcagacgatactgcaggtgtgttcgatagtagtcagtcgccgagaggtgagagcgctaatcgtgttgactttagaaatacctgagggaatctcgagacacattgttgcttgacaatgttgaaatgggagcgggtctcgctatgcgctacgcaaaagcaatctcgaggttagatcgacaagaaggtaactcgctactgaacgtttagtgttctcgtggaggctgacaagttcatcttggcagtggccatgccgaacataggaggctggcagccagatagctcgaatctcctggccagtcagttcgcagcaaagaattactattccggagaactctctggagcgaggtttgtgctggatagtggtcagtcccacttttgatgaatagcaggggttccgggaaacttatcgcgtaatctgcaatcaacccaggtttgcaaaacctcgagaagctcgccccaaattcctcctcgaccgaccagctcgcagcgttccgtcaacagatggccgaagctgttgcaaacgtcgagagcaagtctaccattatgccggtgcctgctttgcgccgtttgctgttgcgagcagtctccgcgttgacttcctcgccgatcgtaagttagcagaatggttgtgcgtgccacataagtatactactgatgtacgcagggagccattgcagattgatagagatatcctgcattatctggttgcccttccgatccggtcttttacggcactcggtatcgcggctggagttgatgcatggacgtggcttatcagcgaacggcctgacattgaagtcgcgctgtcaagtgagatctccgatggttggctttggaccattagacacgggaaggggcttttcagcgatcatctgaagtgagcaagcccatgcaaattttcttccagagggagtggctaaggaccttgcgtacagctctcctggccctttcgagaagcctatcgaatattcgcctacggtcaaatcagtaatggatcacgagatggcagtagcaaagcgatctttacaacctcatttactgttgaccgcggtcatctcgagcaggttccaggccgtcaagtaccgtcggccaggcattatgggttctatgttccgcctgctcgctcggtctttccaggctcacaagcagatgaggtaagcggggcgtcgactgaagcgctctaccggtacctgattcacttctgtgctgttttagtactcatccattagctcgcgaggtcaggttctccttggtcctcttcgctctacaagtcctagctagtagccgagtagaaaccttgttggaggccagcttcagggatttgatctattccgcgaccctgtcatggttctcagtgcgacccatgtgagtaaagaagaactctcaacgatatccagcgtatctgaacctggtgctgtaggtggtctttcgggagcaatcgtattcaggtgcaagcggaaatcaagctgctcggggaagtgctacatgcgcttcagaatgatcatattcgtggcgaccatgacatcacatcgcttcctcgacatagcccggcgtttcctattgcaggtaagctgtcctgcggaatacaagcattgccctgccgattgacctgattccacggcacaggatatgcttccttgcgagactatgctctccaacatgcagagcgaacacgccttttgcagcttctggttgagaacgagatgactaggctctcaacctggtcaaatcccacgaacgcccccggacggattcagacagcttcgaatgccatcgaggcttcggtcaacggggtaagtccaaattgccttgaaatttcgcgatccttgtcttatggtaggttacgtcataggaacaatggccagcccttgttagaagagcatggagaatatctcctgctgctgctgtacatatgggagagcggttcaagatcccacaagtccaggcagagatagcgcgacttgtgaggtcgcaccctcgagcggttatcgacgtgccggaagcccttcatttcttgcttggcaatcagctggagacctcggcaattcccgccttgaaggtcagtcggttctctggtcagcacctgtgtatttggctaaacgggccgtgcttggcagtggctcgtgttgtgggcccctgtgccacctgtgacagcggtaacctacttccaaccccgctacaataacaaccctctggtcctacagtatgccatgagggctttggagcaataccccgtcgatttgacgttcttcttcgtgcctcaagtggttcaagcacttcgttcggacggagcaggtaagtccgcgctgatcgaatccgctttcgttcccagctcacggcgtgttttcaggttacgttgagcgattcatcttcgagacctccaagatatcccaactgttctgtcatcagatcatctggaacatgaaggccaactgtttcaaggatgatgcgggcgagatcgtatgtacatagctatagcgatccgctgttgcctcactgacatcttctgctcagccggaccccatgaagccgcaattggagcgcatggtggacatggtggttgacgccttgtcgggaaaggcaaagcaattctatgatttggaatttgactttttcaatgaggtgacgtctatttcgggcaagctcaaaccctatatcaagaagtccaaaccggagaaaaaggcgagtcgcccgcagtcaactgtcaggccgtgcgcctgaacatatgcttaccttgcctatcacaggctaaaattgatgaagaaatggctaagatcaaggtctcggtcggcgtgtatctgcctagtaatcccgatggggtggttgtagatctggaccgaaaatccggtagacctctgcaaagtcacgccaaggtgagacattctccgcttatccgttgacgattccatacgctgatcacgctccttaaccaggctccgttcatggcgactttcaaggtcagaaaagaaaaggccgtcttgactgacgatgtcgatgacaatgcagaagttcagaaaaccgaatatgacgtgtggcaagccgccattttcaaggtcggcgacgactgtcgacaagatgtgctcgccctgcaaatcattgccatgtttaaaaacgtgttcctgaaggcgggattggtactgtacttgttcccctatcgagtcacggctacggctccaggagtgagtctgtctcggtatttcgtgcagaatccatgtgctgatggggcaaccctttttccttcagtgtggagtcatcgacgtggtccccaacgcaacgtctcgggatgagatgggacgagccaagatcaatgacctttacggatactttatcgacaaatacggcggagtcgatacgccgacattccagaaagctcgtctcaactttatccaatcgatggcagcatactcggtcgcgtgttacatactacagatcaaggaccgtcacaatgggaacatcatgatcgatggtgagggccatatcgtacacatcgactttggtttcctctttgatatagataagtcggcttggcttaaagcgcgctaatcaaccgccagcttacctcttctttttggtatcatcacgtcccggaggtgtcaaattcgaaccaaacagtttcaagttgaaccacgaaatggttgcattgatgggaggccgagacagccaaggtttccgcatgttcagcgaactcacagtcaaggctttcctcgcgatccgaccgtacgccgatcagcttgtggataccgtgcatctcatgctcggtacagggctgccatctttcaaaggggaacctacgatcaagaggttgagggaccgattccaattgcaattgagcgaagaagccgccgcggattacatggttggggtcatcaagaacgccaacgaaaactatcgatcggtggtgtacgatgaattccaacgtcttcagaacggtatcccctactaagttgcatgccaactcgagtttgacgggatcgactcgtcgcttcgcgggtcgtcacataatcttgtatcagacctactagaatgcgtacaatatttgatcggatgggcgagcttttgtcatttagatcaagccttgtcgcttcaagtcgtcgtatgtcttcttgtcgtagacgtttccttcagagtcctcgaactcttcggtcctctcgacggcatgctgctccgccctaccttcctgcttgagacgctccgccactggaaaaaaggcaaaccaacaggggttaattgaccatgcggagcttggacattcagatgctccacttacaggcaagggcgtcctggattttggtgatctcgtgaaagtgtttggtgttgggcaaacctagagcacgcataccaaaggcgtgtcgactctcctggaaatgtcggtcgaacgcctttctacccatgtacaggaaatccgaacagatttcacacttgtactcgacacctaggccgtgaagtttgaacagccagtaaggaatcggcttgccatcccaaccaagaggaagtttgagaggattgtagatcctctcctctgcttcttctgccgtttcgtcgggcccgaggtcaggaggtacctcatccacgagctcttcaagctccaattcacgctctcgcgcagtcagagccgatcgcctctcaatattctgctgagtatcgccaacgagcgaagggatcgggggaaagaagagaagagtctcggtgagacgcgtaagaagggcagagttgtgacttctcgatgacgaggcggtgttgttggcgacattggtggtcacgggcgcggcattcggtgcttcgccttgttctccgctggcttccaacttctctgcggccttgacgtgcttctttgacgtcagatgagcgtcgtaaacggtttgtttcgcgtactgcttttgacctgttttaaattatacaagtcagttccggattcagagcggctcctgttatgcaataacaacgatcatacttacaagcagcacaccagatcccatctccactctcctggttcgctttcccatccgttccgtttgcctttttctgccaaccctcgacattgccctctttccagtccttttcgaattcctcctcgaccggcttcaatgcggactgaacttctcccattcgaaggggatgtgttcgacgcataaagtcgagaaggtatgccttgaggttctggacgtaactgagaacgggttgcagtcatcagggctctgtgtgagaggaacgaattccttgagcacagctgaactaactcgtaataagccagtccctccttctccttttgatcgatctcttccgccacacgccccttggtcaacatggtcaagtactgcatgtagctcaatctttacggtacaagcgagtcagtatcatcgtccactggcagaccatgcatttgactcacctcttggcacccttcaaattgacgtattgcgtgtgagcgatgttcaagtcgaggtaacgacccattccctcctctccggtgaacatcgaatcgagcgctagaaagaggcgggacgtaacagcatgagctatcatgaacggtatgacaacggcactcaacaactcacgatcgacgatctcttcctccccatcttcgcctcggatcctggttaatccatcgccctccacaagttcctgaacacctcgggcaaagttgcgtgtttcgggttccaagttggggtgacgggcgtggtatgacttgatcttgtccaatcgggtatagaattcggctagatcgccctgaggatccccttttgatgaagatggagcggaaagcagcgagagctctgaagcacggagactgaattagaaggacgaacgacctggtcagctcggatgccggtcgcctagagggacttggctgtactgacccgtcttcatcatcgtagagcttcaaaaggtcagtctggcggtctgcgattctgttgagaacgtccagtgccttgtgttggtttctcaggttggctcgagcctatcacacatcaagtcaagtgtatcaaggatcagcgagtatgttgctaaaactgaatggcctcggtgaatgacatacccctcgaacaggttttgtcaagatgtcggccaacgcctgctcgtatctctcgatctcctcttgcgattgacgctgtatctcgatgacggactccatgtttttaacgtgagcgagagcagtagctatgatttcgctgtcgctggtctacgtgcttcacgatctctgtctatcaatgtaaagtcgaagtacaactaccatgcaccattcgggagtctgacctagtcgggccatcgatgtcgagcgctcgtgttagttttcacgtgacgacgtttgcctcgctcacgctcacgacctcgagccacctaagggggatggatatgttcatgagtcgttgcatcattcatgacccgaacgtccatgcatcaggctacattcaccaacacttcaatagctactattcacatcgctcacacagttgaaacttagataagatggccaacgtaagccgagccggacatcgcatcgtaattgcagaatagctgacatcgacgccgtgggaaatagctcaacccgtgtgtatctagtcatgtagtttttccaacaagtcgttgagctgacaaagcgaaacttgattccacgatagcggtgatgaaaagctcgttttcgagtcgtcgaactcgatcaaagtcgtacgtatcgtctgacaagtctcgtctgaaaggagaggtcttcttccggcacattagcgggatgccgcttgcgatggctagtcggcttgatcaagcatgactgtcatcgcttgggcggacctctccaacttgaccgagggcttttttataaatgcgcatattcgaggaaagtggaagctcacccgtgaacgtgctgcttgtcgctttcctcgagatagtgccctacctgtaagtagtctcagaaacgcttgtcccggactggcacttatctttcgcgacgtttgcgctcttcctacaccaacagtcgaatctatggacttgaaggaagacttgatccgaggaatctacgcctacagtatgtcatctttgtttattgtcgagccgcatgcaatctagcttattctcgatctgacctgtcttatgctagacttcgagaagccttccgccatccagcagcgagctatcaagcccatcatctctggacgagatgttatcgctcaagctcagtccggtaccggtaaaaccgccaccttcagtatctcggtgctccaatccatcgacacctcgatcagggagacgcaagccctcatcctctcgcctactcgagaattggccgttcagatccaaaacgtcgtcctcgcgttgggagattacatgaacgttcagtgtcacgcttgtatcggcggtaccagtatcggcgaagacatcaagaagctcgaatacggccagcacgtcgttagcggaactcctggacgtgttttcgacatgatccgcaggaggaacttgaggaccaggaacatcaaggtgagtcttggtcgacatcgtccagcaccttgtgcatgcattaagtctcatttcttatgtaatggcagatgttggttctcgatgagaggtacgcctcagagccggcttgtttggctacagttttcaacgtgctcgagctgacctttattgtacacggtcacttggtagtgacgagcttttgaaccaagggttcaaggaccagatctacgacatctaccgataccttcctcctgccactcaagtcgttattttgagcgctactctccctcacgatgtgttggagatgactcagaggttcatgaccgaccccatcaggcaagtcttggatcgcttccctttggctccagtgttacccaggggctgactctgtttgctgctcgtagggtcttggtcaagcgtgacgagttgactcttgagggtatcaagcaattctttgtcgctgtcgaaaaggtacgttgcgagaagcatgtctgtagcctcggcccgacatactcatcagcgggatttggcatattctaggaggacttcaaggcagagacgttgttcgatctatacgacacgtgagtcttctttgagacggacgagcggttttatcacagcagctgaacgtgcctgtgtcttccactccctgcagtctgaccatcacacaagccgtcgtgttctgcaacacccgcaggaaggtcgattggcttaccgagaagctccgtgaagccaacttcacggtcagtagcatgcacggagacatgcctcagaaggagcgagatgcgatcatgagcgaattccgaggtggacagtcgtacgttctgtacccattctatgtgcccatcatctcaagctgatgtcccaacgtgaccgttcaccagccgagtcttgatcacgaccgacgtttgggcccgtggaatcgacgttcaacaagtctcgcttgtcatcaactacgatcttccttcttcgcgagaagcttatttgcacagaatcggtcgatccggtcgattcggccgaaagggtgtcggtgagtgtcctagggatttcagagcgacaggctatatactgattgtttgcaactgacttcacttcagctatcaacttcgtcgtaagtccattgcttctgacaattcgaacgataccagatccatagtctgatatccacttcctcgcgctttacagactgtcgaagacgttcgtatcttgcgtgatatcgagctctacttctcgatgactgtcgacgagatgccggctggtgtcgccgaccttgtttaaggggcatcgaggaattacccgactgtgctacaaagtctctagtctggatcgaattgtattccggggcgagcgagaatgatgatcaatattacgcagtccatcgccgagcaatgaccacgtgagactgcttcaacgcaggacatgccagattgctgttctgtttgggtcactcttttctatccgatctttcgactcagatcgccgggacaagccgagatacgtaagatccttcgcaaggaatatgttcgttctgttcacgctagatccaccgccatttgggcgttccgctcagactcgactatactttacgaggatcagaggtcacggatctactcgtgcttgtttgagccacttgcacgactcttttcttacttgtacttgagcattcatctgacatccgaggctattcatcttatagcctctgcggcggtaccatatgttttggctacaataccaatgcccgtaattgcagtgacttgcacctcatactgcagccgatgcagcttgtcatacatcctggaccgtcacatggaggatgtcggatagctgcgcacgaacacgtcgaaaagggcggtgaggatctagaacaaaaggccgaaaggcactatggtccgcgccgatcatcttgttcatttctcgattcgatcgcatgcacaacccggaactgaccgattgcaacagtccatatatggagctcacaggaccttcttcaggtgcgaggtgaaaatgacgcgcccatcttcggttttagatgtgatgctcatcagccagcgaaaactcgccacggacgcggcgacagcccagcagaatcccttacgcaatatgtctcagccttttttctcgatcaagtctcaagacaagtggtggagtaagtcgatggtaacgcttgttcgcgatggccgcggcttcagctcacggaaccctcccgcataggcaacgctactcccaaaccagagcctgaaaagaagcctgagcctcctaaaccgtcttttgggtggccggataaagggtattacaacatctttccaccgatgccggttggagtgccatcctcgctagccaccaagtttgccgtcggtgacctggttgcctccgctaccccgactgcgaaagcgaaaactggcgacgcgctcaagtccatcgctttcccgtcgtacatggttcccgaagaaatgaggacctcctggaacgccttgaggtgcatggtggaagggaggatcgtcgagaaggaggacccttctctttccgccagtatgggatgggctatcgccgagcttgccgaagaatcgaccaagaaagagttggtgaaagcgaacaagaagtagcatgttgggtttactggtgagacccagctatggccggatgggacttccgtttcaacaggctgacacgactgattaatacccggcaaaccagccagattctgatcatgggaaattctttgttggactcctgctgctttccactatgtactttgtcctgtgtcgtccacaaagcttgtgcgcttgtatagatatggtcgtgagtccgagtcgacaaagcaagccccggtttgaccgtgacgtcagcccggcaatcacgtgatctcatcggatgacgtttccgatgagatcgtgatagcttcccagcgttcatgattgagtatagcgagtgatgtccttttgaggttcatcctataccccaacatttggctatctcgtagtataccttgtgctgctagctggacagatatcaactcctacatcgctagattgtaaaaggctgatagaatcaccgcagacgcgaagacaagctggtatcgaacggattcgaagctatgtcgagcacgccagtacatcccttaggcagatatggctatgggcacggtcggtcattcccttcaaaacatagtgactttcgaatccgaggtcccgggcgttcgggaaacatccggtcgcatcgttcggcccttcttgatacatcgagcttctggagagatttggatctatcccaggttctaggcgacgacgagacttacggtcacactggctgcgtgaatgcgctcagctggtctcatgacggttctcagttactgagcggttcagatgatgctcggtaagctttactttggccaatatggaggaaatcgccaaggactgagaatcgaagaaggctttgtatctgggagccagacgaaaacaccacccccaccactgagacaccacatccgttccgcttgaaagaatccatacaaacagctcatcgggcaaacattttctcggccaagtttctccctcaagcaggacacccgacaatagcgtccgtagcaggggatagtcgggtcatggtttacgatgtcgagcgtctcggaagaagcacgcatatgctcaatgagctggacggtcgggttagcatactacaagcacacgaagcggaaggcagactcttattcacctcattctaccacagagcggtcccggggtccgcgagattatgtgccatacggatcgggtcaaaaggcaagatgcaggtagatggcctagctatgatgctctcgcttacacgctttcttcaagcaggatcagcacggaggataatccacatgtgtttctgaccgttagcgaagatggtaagagcgtcacctattacctaaggtctattcgcttctccacgcgttaaacaagatcaactcaataggaactgttcggcaacacgacttacggacatcgcaccggtgccgaaccgaggatccaggtcgaggtacgagttgccccgtgcctctactagaagcacctggaggcatcgaattatataccttaagcgtctcgaagctcaacccatacctgttcacggtcgctggaacctcggcctacgcgtatcttcaggacaggaggatgacgaggcagatcaccgaggaatggagccaccgagttgatcctggctgtcaggtgcagtgcgtacgacgctttggactgcctccccgagccgggaaaggtcaaggtggcccaaaggcaagcagatgggattctccgcgacacatcacggctgtgcggatgagtcccgatgtctctgaggacgtacgtttgtcctggcgacctcgccttcgtattcgagctgaaatgacagtcttggttcccttcaacccagcttatagtctgtaagtggtcaggtcaagacacacgatcgatgcatctaatgattactacgatcaatagccttctcgggattcggcgtcgcattgtactccatacacgacacacctgggcagcgggcggacggaatgaaagacagcgtctcgtcctcccgcatgcgaagcgaatctcgggataggcaagaacagcaaggcactgtaaatgaaagcgctcaaatcgaaacaacgatggaaacgagacccactaccgtgactaccgtagaaatggcaagcagtgtgggaccctttgagggcgagtcgcttccctcaacatctttagatcaggtttcgcgtcgccgatacacatcgacggattttctgttatcacaaggagactcggacggaggcgttctctctttggagtcgccaggtccagcgatgagtagctcattaggagccgatacacctctcgaaagttccgaaagcggaagcgtggatgaatggagcgttgatgacgaagattctgaagtgcaagacatgaaaatcgaaaccgaaggcatgaatggctcagggtggggacaagtacccgtagtctatccgcgcgccacttataaaggggcgcgcaatgtcgagaccgtcaaggatggtaagttcagttcaagtcttctggaacgatctgccgggtgtcgactatttatgctatctgcctccatccaagtctcgtttggcggagcacgaagcgacaaggtttgcagtggctcggacgacggcaattggttcatgtgggacaaaagcaccggtcagcttgagggcatatgggagggagatgggtccgtggtgaatggtcagtaatctcgcaggtcaacatcatttatgcaatggcagtgtctgacttccggtctcgctttcgcagtggtggaacagcatccgtcattgccgattcttgccgtctcaggtatcgattcgactgtcaaggtaaccgatatggcgatggaagcccagtcggtccgggctgatcaagcttcattttgcgtgcacagatttttgcgccgttacatgatcatctcggcataagcaaaaggcgaattcaccacgccgacgagatcatagctaggaaccagctgccagagccgtctcccgtaggctacagcatgcgacagtatcgtatgcttatcgaaagccgactggctaggcaattgaacggcgatgagggagaaagcgatgaagatgcgccttgccaagtacagtgatacctgaagagtcgatacgatcttgcgtaatctggaccattctatctctcccaaccatggtccgatctcaaactctattatacacgaagatataccatgcgatgagaaaaatgcaatgaaaaagaagtttgacccccgcgacggcaccgctactgatagtggtagacctttcagtgccgccaatcttcgtcctcggtggcaagtcggtccccgagcggaacgatgtcgatcatcggaaggatcggcagactcgcgacgtcggggttgctgaccacgcaaggaggtgctgctaaagtcactgaacacattactcccccagcaaatgctattcttatattcagtaaggttcagcctctcaaaaaatcgctaatctcattgcgctggctgcatacccatcgtgagaccgagccattttaccagaaggccaccatgtgaatccaccgactcagcagatgggaacttgagcagcacgttgatgaaagacgccgtggcttgcaggagagatctagcactgtcgtacgagttgggctgtggtgtagttgtggtagcctcgggagagatccttttaaaaaagtgaaatgcaatacctaaagagagggagaaacttcagtcaaacactatcctttatgatggatggtgttgagtgcacctggatacatccgcatcagaatcgaggtgacgagaggcgtcaggatggtccaggtctcgcattgccaagcctggctctgcaaggtttcaggcatactctagacgtccgcccggtacccaatcaatgccccggtgtgattgcgtccatgccaccgtcgagttggtgaaaaacgtcattgaatcgaattgcacatcgctttgggcgagtccgcctcggaatggacctgacggaatcactaagatgaagttcatcgatatcatctgaaggcgcgaaggatataatcgatagtagcagatcggatcgagcgaaatcaacttctgtcctacaactctcgttcaccgataaacgcgcccgtctttgcagccgggaccgatcaagccctccctttgcctttcaaccttactacaccgggtcccgtacttatctcagggtcgatagtcgtttcatcctgagtcgtcaaattgaggattagcttccttccttccgagtttcgttgcgagcgcgcttccgcacgacttacaggttgacactgatatacaacaagcacggacaacacctcgtcagtgagtgtgggcttcgagaaccgagcggcggaccaaactgacctctgcgccgaacgacacttcagccgcaccgtcgaccaaccagatccgggtgactttctcctccgggcacggtttcctgctttggagcgcttggggacaaccgacccagctggtaggacaaggggaacgatttcggtcagctatattgctaaacgagatgtgggccgcgactcactgtttccacgagtcgagcgggaggaccgcttgagggtcgtcatgtccatatccatcgaccgggcaaaccgagcctcttccaaaagcgtggttcagcgtgtacaacgaatgcatgactgaacgcagagagaggttcgtttcaacgggttcacgccgtgaacattgctcattcgcttacgcttggtcacgctcgaataaaagcaggggaaaaataccctgacgagttcgggtgcgcagatgtattcgctcccagtcatctcatccgtatgcacatgtagctggtgtttcccccaagtgagcaaagagacctgatggacccagagcatcgctatactgagtactcacctgcaagtctacgttgaacggccggagtggagctttgccgacgagttcgggttgtacgtgaaccaagatcgacactggtccgaagcattcatcatcagccggccgcatattccgtgagagatctaggtcacgactcacctgatcgatactcggcttcgagcagcttgtcaaacatgctcgcccgcttgaccgcacatgctctcaactgacatccgatatgggttgtggtgaatctcaactcctgatgatcgagcccggatcccttgccatcctttctcgtcgacatgcctgacggtggagcaaggtggagataccgatgcctcaacgcatgtgctatcgaagagtttgggtccacctcaatagagttgattgatgacccttcggcggaaatctcgctgatgaacgcgcccgaagatgcttggctctgcatgaccgcgcgcatatccgtcgagatcaatgcccaaagaagcgcggatatgtgttgataattttccctggtcaaggcgatccgggtgtaatcgagcctcgtacaatttgaggagcacgacgcgtggggcggggtgggcggacggtcgggataagagcctaactgatgatcgtgatcgcagcatgatccgtcgaggtcgaggataggcgggtcggtagaggacagggacgacccatcttggctctttttctgcgtagtattgttccgcttgcccttctttctcatctgcgctttgctcgtcgaagccagctttggcacgggtctgacgatactcggtgtcaccctgacgggctggatcgaggccgttgctcttgcccgaggagaagggggagatgctggaggtgacaggggaagagagacgtagttccggagtgtggatatcatgttgagcaagattgccaagcagattatcgatccgagttgagagtgagattgacgccgatcttgccgcaagtattctggtggtttcgttctttatcgaaccgaaatcgcttatgtcgagttcggtcaagtgatcctgttgacgcgctgaacgaccgtctcgataccgtggttcctttgaatcctttgatcgtttacttatcgaagagacaacatcaccgggaaccatcatcgctactcatggcgggtcatggtaggtcctcctcatggtctgctcttcgacagccgtatcacaggatcagtcgggcttcggacgccagactagcggcgagagcgatcgcctcgacccgatcgtcattctgtcgaccgttgcagtcctcgtttcgaccggtcatgtccgtactttcgaggtgtcggggacttccagccgtcatggtttcgctggaacgcctcctgttcgcctccctatgtcattggtcgccacacttgaacaaggtgatgcagttttcgattagtctgccagggattaggggtcgaccctttcgtatgacatcgtgttcctataaacttatgagcatcgccgagccggatcatgttcatcatcgaggttcggatgtattctgctgccgattcattatttacttccgatcatcatttacgtcattgcaacttcggatgtaaaacttcgggttgaagcgaggtcgagagagatatggggttgacaaatccaaagtcgtgcattttgggaaacgagaggcaattcatcgatacatatcaatcaacttgcaacttgactacacctcctgtcgctcgaaacaaaactagtgacacagaatacagcgttctcgcagttcacttgcagaatccgtccaattcagagcactcccctcgttcacgcctcggttgatctcgctttgccgtcgcccgcacacgaccatggcattctccggagctctccaactgacggacctggatgattttctcgctccatctcaggcgtgcatcctgcccgtcagacagaaaaacaaggtctctgatcaagccgaaggcgtgaacccggatgtaagtaccagctaagggcgaaactacgaatcggtgggtgctgacccgtacgttggccctcaccacttttgcagaccgatatccacattgatgcccagaataattattacgaagtggccatcagctcgaagccgtctagcgctgctccggcacctacattgaagccgacggacaagcctataggaggcacggacaaggcaggagtgatcgaagtacagcctcaaggcgctcaggggaaacaactagagaaagcagagatcagcttgaacgattgtcttgcatgcaggtatgcccacgtccgctgtctgtttcgcgtcctcatagatgtagcttatcaatttctactgtgcgacttatcagcggctgcgtcacgtctacggaatcgatgttgatcaccttgcaatctcacctggaggtgcaaacatacatcaacaccgatgatgacaagcgtatcggagtcctcaccatttcccctcagacactcgcctctctcgtcgcctcgtataccgagaccccttccccctcggcgtcatcctcctcaactgagcaaggactgaccatgacccggttattacgacggatccgcgcattcttcacctcgtccgagaacggcacatgggcaggagtctgggatacgacttttgcccgccacctctcgctcatggaacacgtcgccgagttcaaggaacgtcggctcgtgggcaagggcaagcaagcgctcaccccgtcctcggcggatgatcccggtacgcccttggaaggcggtgggttgcccatgctggcttccgcttgtcccggatgggtatgttatgcggaaaaggcacatggcgacctcttggactttgtcagccatacgaggagctcgcaaggggtaatggggagcctggtcaagcagtggtgggccgcagagagggagaagacgtgagtagtcatctcgattcgactttaagcaagtcggacgcatcgctgatgtgatttgcgaccatgacaggccaaaagacgtataccacgtgacggtcatgccgtgctatgacaagaagctcgaagcgtctcggtcagacttttactcggagctatacgaaaccagagacgtcgattgcgtcttgaccacgggagaactggatctcctgctgcgggaaagagggttcgacccgttccgtgcggtcgcaggagaagacgtatcggaggtctcgcctcaagccagccctttcccggagctgatctcccacccgggtacttcgtcgggatcttacctccacacgctcatcgacgccttggcaagggagcaccggaatgatactcgaatgatcacgcgaccagtccgtggatcagaagaccacgtagagtacatcttggaagatgccacgacgggggagatcattttcaaaggcgccaagtgttacggatttaggaatcttcaaaacctcgtccgaaaagtcgggaaagaaaccggcgtcaaggccgtcgggcgaggtattggagcgagcaaattgtccgccgcggttgctgcgagaagacgagcgggaaaggccaagctggcagccggacaagactcggcggtctcttcctcggccagttctatagccgagcaggccgaggaacggacactggattacgtcgaagtgatggcatgtccaggcggatgtgtcaatggcggaggtcagatgaagcccaaatctgaaaacgcggcgaccgcggcccgaatagccgcggaccgggatgaggaaggatacaagagagattgggagatggaaggcgtcgagaccgcgactgcacaggtcgacgagggaatgagatggtctacgaaaagctgggtcgccactgtcgaaaaggtctattggtcgggtttgcctaccccgccccaatcgcccaaagcggacgggcaagaacaggttccggcactgcatcaagaggacgaatcaacgaccattgcgactgatccgcgcatcgagatggctgaccgaatcggtcagagcgtgattgaagcggtcattaaaaatgcgaagcgctcatcgtcaagcactgtggccgaggccgagggtcaagctcgtaaagagttcttgaggacgcgatatagaaaggtcgaaggggatgtaagcggtctgaccgccaagtggtagaatttgcatagctggcatcttgccggatgaaacacaatatagatgctattagaatttattcacggattgatgcgatcacttcgcaagaattctgccaggtcacttgaaggtcgacgcagaaaacgccgactctacccatggattcgcaaaggcgcacaatctggcctgcgaagagattatggttccagaaggattgaccgctcatcgtcggacctgcatcccgccccctctatatcacgattccacgactggaccgaagagggcgacgtcgacgaagaggtcgagtcgggtatcgcggatgaactaggtgatagttatcgtgatgcatcattacatgtccttgctgtgaatagagcaggggacgatttgagattctctctctccccgcctcgtagcttggactgtcactgttcctttgtcatgacacgtcttttgccggtagagatgattgcgaaatgcctcacattatgatataaacgtcgttacgattctcgcgccaccaccttagaaatccgtcacccgtcccgaatactgccaatcattgttccccgcctggaaaggatctcgcttcggccctcccacctcgcccgtcgccgggttagtctctccttcaaattcctttctcggcgtccttctcagatccctatgggcgatcaagtcggcattgctcgccggggctttagtggcctgcgctcgggcgtcgtccagcgataccccgggaccttgcgcggccttgacgagagcgtcaaactcggcttgttcttttcgaggaaggggcatgggtccctgtcgtcggatggggggtgccttgggtttagggtaggccagtcgtgcggaggtgtgcatggtccgacgggatgccaaatcgttgggtcggttccctgcgacagcgcctgcgccacgctctagcaacttgcgtgccccattactgatcaactgtcccgctccggctctcgcgatccctgcgagactcttgaccgtcttccaaccgtccaacgtatccgccccggcctcgtaccaactcttctgcttgactcccgcattcgcgcccacccgctccatgagggctcgcttgacaggggtcatctcgttgatcaagtccatgccggtcgatcgggcccaattgacgattgggatccgggtgccgaacacgtgatgcagcttgtccgtcgtcgacagcaagaggtggttggccgggtatcgctcgcgggggtaaggaagcatggccgtgtaggcgcctacagtaaagtgtttgtcaaatgcgcatcagcagaattcctctcacgaccagcgatctcgggaggttttcatgtcgactcacctaaatcacctccgacctggccgaccttgtcccacgtctccgtcaacgcctttacgtctgctagacccatattcaacccttgcccggcgaggggatgtacagtatgcgccgcgtcgcctaccagggccgtccgatcccctatataactctcggcgtgggacaatcggtaaggaaaggaagcgatggatttctccacgatgctcgtgatgggtggaggcaagctcttgacgtcctgattcgtcagggtggccatgaccgtctgactctctgcctcgatcatctcaatcgacacgccctggctgaggatggccgtgttcaatcgttcgagttcctgttcagaggcgtacaatccgaggttgacgagatgcgtcaatgcttccgggcccaatgccttgtacgcggcggcgagctcgggtttggtggaccagaccatggtggacgaggtcggggtcatgggtaaaaaggcgatggggcccgtgggcaagaacctctggaacgccgtatggttggcatccaaccggccgtggttcaaggtggcgacgatcccgtgggtggggtaggcgtgaccaaaggactcgatgcccgagaacgacctgactggggaattaggcccatccgctccaacctgtgcacatgtcgtccggttcgatgattagcctcgaacgtcgaccgggaggtcgtctcctctctccagaaaaagacgccacatcgcactcaccaccacccctcccctgacccaaccttcctctccgagcctgagcacgaccgacctcttcccctcgtccatcctcattccctggaccctggcttgctctcggatgacgaccttgccctccccgacctcggcgatccgaagcaagagcgcgcgttggaggttggtattctcggtcatgtatgccatgggggatcgagtagccggaaagtggatctgggacgaggccgagcccgaggaagtccagacctgcgagcaatcaaggccagggtggaggagggggtgttaaatcggggacgagtcagaggtggatgatgaggcagaggtgaaggagcgcttacgagcatatccttgacgggacatgatcgagatttctcgatatgctgccaagctccgatacctaccgatcgtcacccaatgatctccatcagctttccccctttacgcagaggaaaccttttgtccgagccacggaaactcactcttgagaaactcgacgttctctgccgtgatactgctgaccctgttctcgaggttttccgtgcctttccaattgcgagctcgatcgagcttgcctccctcgactagcaagacgcggcggttgctcaagaggtgttccttggagactacgcgaagcaagtgttgaagaagagtgaaagtcagcatgagaaagccgaattgtttacggggtgactggcggggcactcacgtagactggcggcgagggcgagtccagcgttgccggctccgatgatgacgatgtcaaaagtgtcttccggcgagatcgaggggacgacctgcatggactctgccgttgtactagcaggagacgcatgctgggcgacagtggaatggtacctaggagcgagtcccgaactggttcctaccgcgatcgtcggtctagatgcgatcacacgggagggatacgatcgggttcgaagtcttgcggtgggtgccgtctgtccgatcgaggcgagactaggtgctcgtttggaagcgatggtcctcgcggtggtggcgatttgacgtgaagacaggctcatggtgactattagttcttggtcgttgatggaatgtagctgtggaggatagagtagggtggtggcgattcaatgtacactccctgtatatatgtggtttacatatggttgccccttggacttttgcaactttatgacgcggatttccccgagacatagccaaagtaagaggtacaaggtatatgtatgtactttactctcttctgtctagacatctcattgcaactctctatacactcactagacatcaacatacacctcaccatgtcatcctctgaacgtcgccgctccgaatcacctacaccgacaatccgctactctcaagaagaagagcgtcaagatggggaagattcgaacctcatccccgaaccacctctcaaccccaaccgaccgatgcacgcagaaacccgagcggcgttcaaccaaccggctccttcgaggttgagcagggcggcgttgatcgtcgggatcttggtcatgctctggatcgcatccaagttggggcaatggggggaacccgtgaaaccgcaagtgatctacgcgaaccggtacgagcttttcggggggggggggggggggggggggacgagtgacggatgcaaaaaccaaacaaggtaactgctaaggagagggagctagatgacatggtgtacgatgatatgggtagaacgatatcgatacacccagtcacatcgacctcgtcttcatttcaacactacttggcacctcgacatcggtcttgatcaaatcccaagtcgaaagctctgactctggggggaaagactagctttcggggctcatcgtcacaaggctccagatacaccttgaccaccacgtacgcggcgtaaaaggggagaagcttcaaggaccgatcgatccagagaccaccacggatccccatcggtagcttctaacaaactcgattacacttctccagggcctttctcgtctttatcgagcctcgggatcacgttccgagctcgtcgagaagggcggaccaccgaattctcccccctccctcccagctttgcaaactaaacaaactcttcgcggggtctcaatccagaccgaccctccatcccgacctgctcttctcaaccccgcccgcctcctccttcttagccctcgctgaccatgactccctcatcccccctaaccgacactgaaaccccggcgacactcccacgaaccgaggaaaagggctcgaccgaacgatcggatctcaacgaggcagtccaagattggagggatcgatggatgggtcgtgcggctgaaggtgaagcgatggtggtcgataagcctcaagcaacccaaggcgagatcgaacaagcttctcaagatcaagcagaaggtcaagatggtgacggtgatggtgatggcgacggcgatgtcgatggtgatggtgatggtgatgtcgagatgaacggcgaccagacgatcgcgtcggggccggacgaccggattccggatctcaccgcccgacttcctgggcacctccttcccgaaacatacaggctcgcggtcaaaccgccccatcctaggcctgacgcgtacgattcggggacagacgacagttcgatcacgagcgcgacgttcccattctttgacagtgagaccgagcgggaggaatcggtcgacactccgagtttggctcgagttctggcagaagatgaatgggactcggactacgacttggcaccagcaggaactctaccgacagctgcgggcgaggcggtcgctggcaagacttccgggggcgatcctgctgacgattcggtcagcgagttgacggcgttcaccgacgaatccgaaggagaagccgggggcgctgacggggacgaagacgacgaggacgaagaggaagaagaagaagagatcgaggccaagccggtcagaggctcggcacccccaccaaacaccaacatggacgcgtccgccgcggccaagacgtccccctcgcaatccgctcagaaaccgccgagtttacggaaacctagcatctttggacctcggtcggacgagccagacattcaggacgatggcgaggagagcgagttgacggatagcgagcgcgacttcggcgcggatgtgaccgaacgcaggaacaagtcggaaaccgctcacggcgcgaccactcccttctccaaggggtccaagcctatctcgatcaaagtgacacccgcaaagaccgccgagggagacgatgcagaggatagagacgggccggtcaccccgaccacgacgacggccgcggtccctgccccgaggagattgtccaaacccgcagatgacgaggaaaagccatactcgcccccgaagacggccaagaagggtatcctgggacgatctgcggccggcgcgaccgaaggcgagacggagtccatcgtctcggatgacgaagaggaagacgacgatgagggtgggcagggcatgctcgtaaaggacgcggtcaggagggagagcgagggcaagacgaaaaagacgagagaggatgaagacgaggaagaggaggacaagacggtcgccgaggataggtctgtggaagaacgaggtgagtctgaaactcgccaagggcccattcccggatcaggctgacgcggttccgtcggtcgccagccgcttcgcccagctcgaccaaatccaagcgagtgtcggcgacacccgtcccgtcctcgacctcgcacttgatcaccaacaatctttcttccgcgacgactcagaccacgctcgaggctctccaagccttgctccagatcgaagtcaaatttgccgctctcagggatcagctgtatgtcgagcggatggacgagctcagtcgagaggaggagatcatcgcggatggtacgtcgtttgtggcttgtcgttttgcccgtgcgagggactgatgatgaccagaatcttgtggtgaaacggcaggtacccacccgtccttgttgcacttgcatcagatcttacaagatcgacgtgaaaacctgttgcatctggctgaactgcggctcaagcaaaacgagctcgagctcgtccgtgtcagagaatcggacaagaaggccgtcttatcgtggtggcaagtgagtcaagagtctaatctagcaagcacgcctttatgaccatatgctgacggctggcttcgcgcaggacgccaaggacacccttgtaagggacgagtacgagagcaacgctaggaaaaagcgcagacttgacaaggacaaggcggattacgagatcatcaagccaggtgagccattcgcggatctgcctcttaccttcatccttctcatgctgacgccgtgacgtacagcgccacgagctctgccacccaagctaccgacacggctggatgccgaggcgagaacgtttgcctggggacgaggacccagtattaccgctcttatgcaggacgaggtggccaatgatctggccaagataggggtaagctggtcatgcttctctgttcgcgcgctgcagtccgctcactctgccgggcttttttttatcaggcggccgcgcggagccaatataggcaacttcatcacggccaccgtcagcagcatgtgatggcgggctatggtcgatatgccggcgaggaatctgcaatgatggcgactgatacggggtcgctgatgttcgatccgacggggacccggccaatcgtcaacggtgctggacaccatcatcatgtcattcccgcggcgagcggatcctcccaagcgatggggtcacggcatcgtcactatactcagaccccctctgcctatgacatgcacgccggagctggacaaccacgcgagcgcgagcgcgaacccaggagagaagggaggcaggtcccgacttccaactcggagccgttcgatcctcggcggcgtgaccgaatggaagatcctctcttgaccggtcggatcagacgagatgtcgttgccgacgatgcacgcgatacgaagcgaagaaagaccggcagcgatagccctgcgccgtccaacggcctggggcatcctccaccgcatgtcgctgcagggatagtgcaggacgacccccgtcggatacctagacggtcaccctctccatcacagtcgtcaaaagcgagcgccctcaaggtgaatcctaacgaagcgcagtcaccagggtatggccacctaggaggcaacgcctcggtcgcatcgctcgagcggagtctagcgtgggactatcgttggggtcccggtgcatcatcgcgctacccaaacaatccgcgaagaccaggcttggccgctgcacggaattgaaacaggttaccgcgttttgtcggtcaaaagcacttataatcgaaacagactgtcgctatgataattcctgtcctcgttccacaacttatgcttgattgtggtcctgtatgttatatttttgcaccgcgtaacgatctggttgtcgatatcacctgcaaaggcagcgacctttgctcgtgtgatgccgtatgatcagagtcgcaatgccaatcttggtaaagatggctacgacgtcttcagatcgctacgacatcgtgtcatgctgccttcctcgagctgactcagcccagacgatactcgcggcgatatcggcatatccgtattcagcttttctgcagaatatgccgactctggctctcgagtaggatcacgctgcgttggggagtctggccttcgcttgccgtttcgaacagccattgtccgcctctcgttcgagaaacgattggcaaagcaaatcacaattgataagcatcgcctgggtttcgccgagcacgctccaggtggcagctaagggattatcaattgacgatgaggaaattccgagtcgaactcttgtcgagcttgtacgccgtcgtctgatcgtctggctgtaggtcgaaatggtttcaagcagcctagattgcgaatctgttaggctgccgacagacgatataggctgccggtttggggtgataggccgccgcttaattgcttccggcaagccccaagggacttcgtcgcctcggtcgatgagcaagaaatgtccacgatcggggaaatataaatacattgcacatgcttttcaactccctcaattgatggagctgttctaaggactccatcaaggtcctcaattgacacgcatctgatacctagtacacgttttggccgctcgacatgagtgatcacggcagcacagaaacggtggtggcatcagcctcacaagaaaaggggagatcgtcggatatggccgatcacaccttgaagaaacgaccgtggcgtcgatacatcactccttgggacaggattgtgtcgcacaactacccaggaggaggcacggaggacgacccttacttgatagactggttgcccggctcggaacccgatccggagaaccctatgacctggaaaccagcatacaagtggacggtcacgcttacggccgccgtatcaacgctagctgtggcgatggctagtagtacactgtaagcttcgacaccgtcgtgctcgtctcaaaatctatactgaacggcttgtctgttataggtccgcagcgaccacttccatcagagaaagcttcccaggatacaaagtccaggcatacgtgatgggtgagcttttggaaacgtcatcctggctttcggctataaaattgctgagtcgcgcgttgccgcagtcacgtcgggattcgtcttgggtttcgtggtcgggtgggttcctgcttgcgcttgcaagattcgaaacatgaggtccgatgttgagacgtatcgcgtcacttgttcgaaatacagacccttgctctgggcgcccctttcggaattgcacggacgtcgctaccttttcatcttcacctacgtcttattcacgattttcaatggaggggtcattgcttctcaaaatatctggaccttgatcatcttgaggttctttgctggaactgcgggtagttctcccctgactaacgccgggtaagtaggattcgacggatatgccacaatcctcccaaactgatttggcgcaaataggggtaccgttgcggacatgttcaatgcatcgcagcgtggtctgggaatggccgtattcagcgctgcgccattccttgggtaagctcccgagtcagttttgtcatgctctcgtatgttggctgatcaagagacgttgcacacatcagtcccggtattggtccaatcgtgagcctcgcaaagtcaacgaatacatccgcagccgctgcttatctactacgttgtgcttcaaggtgggaggtttcttgggagaaactggttagtcaaagccgaggcgcagcaaacagaagcgcgaatgttcagctgaagtcgatacgcttcttaggtggttggcgatgggtcgccgcactcattgctatctttagtggccttctgacgattgttgggtctatgctcacgcccgagacatacgctcccgtcctgctcaatcgtcgagccgctttgctcagcaaggtgactggcaaagtctaccgatacaagggagctgccaaaaaggtggagcccagtcaattgttcaagagtgccctctccaagccttggatcttgcttttccgggaacccattgtcttgctgctttctacctagtacgtcatccggattcggtataccgcctcataactatactgacgtctcaacggcgttgttcctcaagccttgctattgtctacggtaccttatacgtaagtcattcagctgctagaaacgttacatgacctatagagctcaaattccgctgccatcgatgtgcagatgttgttcggtgcctttccaatcgtcttccagcaagagcgaggatggtcgccaggcatcggaggtctggccttcgtcggagtacttgttgggttcgcagccgctgtcttatacactatctttatcgagaaccctcggtacagccggaagaatgacgccgaaggatggctgccaccagagcagcgtcttcttcctgcattgataggtggtctgcttctgccgtgagttttcgtcgatcatatatcaactgcaactttggctgacacggatgttctgcttgcagaattgtacgacctattgatcatttgatcgtatttcacgcgagaacttatattcttacatttttctgcagggtctgttcgcctttgcgtggaccgcctctccgaaatccattcactgggtcgtaccgattatttgctcgatgccatttggaatgggtacgcacttatgaacggtcgacctgaccacatgacagcttatccataccttcgactttgcaggcatggtcttggtattcttgtctatcttcgtgagttgacatccctttcctgctctgaaggaggctaatccatcgaattcgattcgtagaattacctcatcgattcgtacttgttgcatgccgcgtccgtattagcggcaaactccgtgttgcgatcgcttttcggagttgccttcccgctcttcgtgtcgaacatgtatgccaacctaggttcgttttgttcgcctacctcagacttcgtatcggacaccctcgctgacaggtcttcgtttcacaggagtaaactgggcaagtacactagtcgcattcttggctttggcttgcgccccgctgcctttgtgagttcaggaaggaaatctggagaatctgaatgaccgctcaccgtttgactcgtcataatagcgtgttctttaagtatggacattcgatcagattgaagagcaaatactcgcgcgaagcggacgagcttgggcaaaagatgcgccaacaagcgttgaaaaatagaggggaacagaaggcctgattcgtcggcaacgacaaactgtatcaatagaggatgcctatagattcgaggaaagcgtgtgaaccaggcatcaatcagacgacgctgctcgtggcagtgcaatgtgagactgtcacgcatggctcgctccatatcctccagatcacccgccgtgatgacgagaagtacacgacgcgactggttagccccgtgtcccgtcccaagtcttggggcatgtagactcgttcattgcaaggatccggtaacgcgatatgttgtggtccgaaatcgcgatcggcctgcgcattacatctcttgctgatcgagatcagtctcgaggtgactgagggacaagaatgacgaccattcattgagactgtgaaagcaacctgggtcaacgagctgaggtgtgactggccaactacgagacctactcaaatccacttggagctgaataccaaaattgctgcagagaatccaccatctctgcagacagtgaatgcgaagccatctcagtatgtgtaccgtatcccggtcgagttgcttgtccatcggatccttctgcttcgctactgccaacacctatgggcatgactcgtcttgaggtcgagttttcctggtggctgtcacgggaaggttcccgcgtcggtcgggatatcgtcgtcaagtcgagaagtatgcgcctatcaattggttcccagacctcagccactctttccaaggtttctttcagtaccataatacaaacctaatgcttgcgcttcgcctgaagacgatgagaaacagcgagcgtgaatacatcgagcgatgacggtcgaagaagtcgcttacccgatcgtgatctcctcaatcgcttggaggcaagtttgcacatcattttgggccagtgtctgagcgtcctcattgccatcgtacgagtttgcgaagaccacgaacagacgagcaacgcaagcagcgaatatcggcatgcccatggcataatgcatcgcccttcgcttcattaatactcgagcgatctgacagcagagacgcgctgcttcgtcgcatatcatagtcgagttgatttccggtgaccgaggctgtctgtatgccattaggggtcgatgaagaaggatctggaagtaacgcgatcaattgaggaactaagagctttcttttctgctggccgttacctggaattgggcgacagtactctccagaactccactttgtatcagtaggctggtctcggagtgctgacctgtccatcttaaatgttgtggtagtcggttgcgccatgattgcaatgccaggcagaaaccagcagctgcttcgaagttattttccgcccccagtctgccttttgtcaggttgaagcgctattgcgagatattctgtgtcagctcctcgaagcctacgactcccttgctcctccgcggcgcaccccactctggatagcagccatagcatatttctgtatttccaagatacgcagaaagaaagctagtttgctaggttggtttgccggttgttggaaatctgtccgaacatctccggtgtcccaaaattcatcatcgatatcggctgggagattctcgtcgacactggtgtattgcaagtcatgatcagtcccagacggttgaaacgtggatcacacatacgcctctggtggaatggccatcggtcgacccaagacttgtgagcatgccctgtcgatgtacatcaaacaccaaagcacgcgcttgtagagttccgataatgtttggtccgtataccgctcgagaccagccgtgatatgaaggccaatatcctgagaaaaggctctgacgtcaaagatacaatgattggtgccaatgaaaggtgtgagacttacgatacacctgcgaagcccgataccagcatagtaccaagcttcgctgaaatttttccgctggagcagaaatcctgctacaagctagaaaggtgtcgatcgagcatacgtcaatcgcgaagggactctccccgctgccggggtcccttactgcgtagacctgtagctgctctaatgtggctggactcgatccgactgtcgtcgtgactatgactgcttgtagatatttccaaccagaagaatttcgagaggcttccgatgtttccgcggtatgttcgccgggccagagaacatctggctcgtccaatgtacgagctgagcccagagcgaatacggcgaggcataatcgcgcaaagtcgcggtctttccgccacctcaaggcataatagtctcgcttgaaaagcacccgattcagaataggcaatagcagattctcaaagtcaaagtacgattttatcagcttgtccgccaagtcctcgctcggccagatagcaaagtcaatagggatggttcggggattatcgagtgttgccttctcccactgagcgttgtatatagtgggcagtggctgatacatgggaatacgtgccgaagggtgctttcgcagagccactgccttttgctgctcgatccagtttatcaagtcgattccacctatgagaaatgcatgagcaatgaatggcggtaagcggctggtcgatctgggcaaactcacagctagtaccgaagtagcgtagtactacaggctctcgttgcagtgccggtggatttgcagcagcgatcgtgctttggtcatggatcccggcgggtcttgattgaccgtccgccttcagcatttcggcaggtgtatcgtcgcgcttggctttgagcttcgggattcgggttctcttgagtgtaggtcctctcgcgattccaagatcagtcaattgttcagcgaaggtcttctggtcgaagtcatcgcgattgagtcgtggacccgtcaattggacgagctcgtcctccgtgtgtgtctgcatttttttatggaatgagtcgtgatcgtgggcagccaagtgttatggcagtgcatacctcttgaaagactgcctcgaggcatttgatctggaactcgagggcatcgacatagcttccatccgagcagcatcagcattagctccttccactccgcctccttgcatcgaactaacccagctggtggtcccctacgctccgagatttcgacgtaggtgcactggacgccatcatgacggcatgttgagcatgctgagtctgtatgcaacagacaaaaagtcagtaacagtcgtgcaacaatttactctttactcactgctctcagaaaccgagctaccatcacatcgagcctacacgaacgtcggtcagagctattcccattggagactcgcttttcatcacggaaactcgctcgttttcctagaccgctgtgcacgatcagctatggatgtaggtctatgcagtttcgctgtgactcacttctacaatgatcgcaagcccgctagtagattatgcgagaaaggataagactcggcttcgatcaactacctctttcttggtccagtcatagagcgcacctcgcgtttccgcttcttgaccgggttagtctcacttgaagacgaggccccaatgctccctgagaggctcatcacgtttccatgaacttgagaatggataagacgggaggttgatagctaagtgatgagggcttatacaacgtgaacaatactgatactagtgatttgatgagaggtctgagcatgccttgtgccctaatttacctttcgattggcatccccctccgccctcggccaagtccgaaacggcgaagtgcgactgcccagatgtcaccgtatagagaccaaatgatgtatttgcaaggcagaacaaggggagacaggcataacgatggggtttgaggccccttcattacagctcacggaaccgagggatgtgccattctacggcgcggaagatacgacacatgcgactactggctggatgcttatgatcattttcgtaatgacaggactccgttctatgcagggtatactggatctcgtcaagtgacgagaaagtttttctgtgcttgtcatgaaaatctcaatgcttgcaacgggtggggtcactttgctagcatgtgtcctgatggtcaagggcaagatcaggagataggccacgagaggggtatgcacatcggaacttacaatgagtcggttcttagggaatggcaaccctccactggcttgctcccacgtagacttgtcattcaacaatgtcagtaccgatttagccacctgccatggcaaatccgctcacgatgttaggattgttgtatgcttccttgtaccgctcgatataggcagctgtcggataatcttcagggtcgcaaccgatattaagctttccaggatcctctacggaagggaaagaaatgactcgatcagacagtttttacagtttggcagattccgtcataatactcacgatacaagcggacgtagtccaccagcatgctgtaagtttgaaggctagattgagatcattctagtttcccatcgggtcatagctgtcacttacgtcgtcggccagagcgattcgagaccctcgtaatccacagctccaaagttctcagaaatgcctatactcattgaatatgagacctgttactgcaagattgaatcggccgagacttacccaggttgatgatgagatacatgggttcgaccggtatttgtcggtaaccaatttgagcttcttcattcggaccaagtgctgcaggtcaagccgatcagagaaaagatcaccaacgtcgttcggactaactcacctcctgtccgaatggtccaggacttagcgccatcattgacccaggtgatatatccgtcgctacacaacccgcggcgtgaattatagaacctcgttggcggctttcagcttccaagactcactctccagtcccgtactcaaatccatagacagacatacaaccagtattgccggtgctatagataatcatgatcagtgtgcggtacagaggcacgaggtagcgatcagacggactagcaatcctggtcggttatcgcatacgcagaagtcgcttgctgataatgtcctccctgatacgagttcaagtggaccacgtcatcgttatagatctcgtacgtggccgatgtgttgatccaggaataatatggattgaacggagcccattgcgcggattgcgacacctagcatatcgaaagtataaatcagacgttgtagtagcggcagctggtatgcgagaccgctcacgtggccctccctggtccattggtcaacctattgcaactcaccgaagcaaaatgagcgaaggtgctgaactacagggttcgtggttgttactcacctgagcctcgatcatgtcaatctcgggagccgatcggccaacgaatccaccattgccgtcgcgaggaccaggatgtgtctcgtcatttgggcaagtacatgccgataatctctgccctggtaagtaagaaagtgtgtaattgtacgcttcgtctccagacgtaaaggcgatctcaggtaggcctgcgatttgggcgtatttagtttggtcgctcgtcgaacgcaacgaaccgtgtacgcctcgacccaccgtccttgctctgatttttcaatgtgccaacatcgcactcgttgtaactatacggccacatcccgtcgagcgttccaccatatcccgcacgtcccactatcatggaatgcatagagtcatcaggacggctaaacacaacacagacgaatggctattctcaacgacttacggtttccgagtgtccagaccgcaggccataatccgtatacgctggaggtcccagggagactgagactcgcctcgaaatatcctccggtataacaaaacttgttccaagtcgtcatcagtcctcccgagtattgcaatccgtgattctcaatcttgtcgagcgtaatcttcaaatgcccattctcggtcgtgatcatgcgagggtcgtaccactcgaggttatttgtagaccaataatgctgatcgccggcttcccagaatggatcgtcccctggccaaaaagtccgtccctcctcgttgaactcgtctgaaaagatcagatcccactcctcgcccgtttccaagctaatgtgcttcagggcggactcgggagtcgaccgatctatgagggtaaagtgcccagggatcacgggaacctgccctgtcccattgatcccgccaacattgtatccgcccttaggggcggtatctcccttatgtcggtcgacctgactcttcacgatgggccatatcgcgaacaatgcggtgagagccatgatcaggacaaagacgcatcctaaattggatattgacctcaagctgaacatgtggatgatggtctgtttcgcacccggtcgatagcgagtgaaatctgaccttgcgggttcgtgaaaatcgtcgtccggttcaggccccagttgatcccacactgcagggtcgagaggtagcgagtacctgcctccgagaccttcgaatcctcgagtgttgatctctctgcccatagtcaacctggcatccagtgttcctagggagatggcactcccgctcgctcccgtttcatactcgttgacgcccaaaaacctcgccttgcccttccgagcgtctccattgccagtctgtcgactgccccaagcatctcttgctccgaagggtgcgtccgaggagaagctccccatgggactatgcccatccgacgagatacttgatggtcgactaggtccagcctctgggccgctccccagaacgaaagcgggttcgagaggcggagctgctccgggaggcaagaggtgcgatgtggacgtggtcggacccgccgtgtacgtcgattggaaagtaggggcgagcgaaatgacagatgattgacgggaatcatcgatcgaaaggtcctcgacacctgtaccgtagatcttgttcaagtcccgcgcggctttgcgtgggctgggttcaggcgggtaagagactggcggaccaacgatcggactgggtttgctcgatccgttaccgttcttcaacgggtatcccctcgaatcgaatcttgtctcgcgcgatgatgacccagcaggctctcctttcgacttttggcgagcggacaatctcgatgggtaggtcccccggaccggttccaagcttccatcccatcctggtttccgcttgcccgttccaccgtcatcctgtccactttcatcctcctgatgttcgtatcctggaggagtaggcgcgatcgatccagtcggcggagtcctgggcgagttagttaacctggaacgcaggtttgacaaggtattcaagatcggggaggtagctgaggagaagcctttcgagggagactggagcggttgaagattcggggaccgagtcgatgattccgcgaaattggcactcgaggatccggcattgtttgagttggccggtgtgcggtcggtctcgggctcgagtgggcgaacgtttggattaggacgtctggtcgaggtcagatctctggcggcaggcataatgtgtgtgaacgagtcctgctctttcgtttcaatggtctacaagtctttgcttggtcaattatgtcgaagcgaatcactaggatagcacgctcatgttcaagagagcagcgaggaattgcgaatggtgtgatcctgctacgaccaagccagaaggcctggagattggcattttgcatatcctggtgtgacatcttggcatcggcaacctgaattccttgttttgggcgctaattggaatcgatgagcagcggcagcagctgcaggcgagcggatgtaattcgcccgaagtcgctcgcggctgtgtgacgcgtgatgccggcatgattgtgattctcgataacaatcgagcttgcacctgcaaacatctgattatccgattgactgatcagcttgaccaggacgtgagtatgagtgtcaaaagtacttgctgctagtgtgattcgttggtggcgtcgagtctgatctagtctgatggggttacttgacatgccgatccggaattaggcaatcgtgcggaccgacgatttagcagccgaggccgaagaacgatgagaaagccacgccagcttctcccgcgtttcatactgagacagggtgcgatgcatgctctcaggaagatcatgtggaatggaaatcagaagatgcgcgtctcattctcatgtttcaacccttgtcgtcatcgtattttgctgaaatggaaggttcctttggatccatcatttttatccgcgtagaatgacggtcaacaaacaaacaatctgaccaaaggaccccaaattcaaaacccgacgacacaaaggcatatgtcagaacccttgcaacctctttctcctgtccccattgaaccccgtttattccctttcccttcttggctctcgattgttcgatcgctatctcgctctagatctagactctcctctttgggtgcctatccaactgtcgcctgtgccccctcaattcgttgtctcagcaaaggtcggcttcatcaactcgaccctgcaattcaaaagatctgcataagtcgtcgaatctcgattagacgatgtatccctttcagcaacactaccgctccccctcagatcccactcaatcacctagtcaggaacataaggcgccgactccacgcccagttgtgctggactggccacccccgtcactagagaaacctccttcaagacttcaacgaatgatggtgccgacgagactgctgaagaagactaccaaagagacgaaagagtatgtcggattcaccccttccggaaaaggggtcaaggtgacagccgggagagtggacgaggtgtacggtagtaaaggtgacggtgagtctggacaggatcgactttcggacgtgcggtctagggtcctttgggtgtgaatcaccttgccaagttctcgctgatgccgctttctttcctgcgtcgatattcaaatcagtaccccaaccgaccgtgacttcgcagcttttccctcatccagatcagaaaccattgccgcaagagccttacgagcagatgatggccgggatgcaagattttgagattgctgagaacgatctcgaaggggttcaacatgatgatgagggcaatccagaatatacgcctaggtgagcgtgtccacgcatactcgagtgcctcgctggatgattatgctcacggtccgtcctcattgcggtgcagcgcgcgtgccaaagtcttgccctgggtgacagagatgcagatgaccccaccccccgctcatcagacccctcaaggatcttctgcgcactatcagacggccgcttcgcaccacgaccctctgtctgctgcagagtacgcccgggccgacgctacgggtcaggttgcagaaccgggtttcgtacccgctccacctcccggcgagctgaggaagagagatacgtggatcgaggaacagagtatggaaagggaacgattggctcgagagtacgaagcggaaaactctttggaaaagggagacgaagatggcgaagaaggggactcgacggaacagcagatgagtgaccaagaagagggtaaagagaaggaaaagcgagacaagagaaaacatcggcatcatggtcataagcacggtcatcgacatcgtcaccatcggcatgggggcgataagtcaaaatcaaaatcgaggacggccaagctctcaaaaggaatggatgacgagccttccgacggaaacgctcccacaggtacgaaagcgcggacgcggaccgcacacagtgctggcatggcttctgacgccatgtcgagaggagctatgagtcccgggcaaggtcaggatcgcccccaagctgactttctaggtgcgtcaggggtcgtgcccggcagcgagaaagcggagcagcgcaacaacgtatctaggaacgtacaagatttacacccaccgctaccggtaggattgggcttaggcgtgaccggagtgtcgtggggacaagctgggcagtcttatcccggagaaccacatccgactcagactattggtgtccttccgggtggtggaaatccggctggattcttgcaaggatcagccagtcaatatcaacaagggctcttccatccgccccaaaattctaccggaaatcagggtcaagaggttttcctcacggggataccattgcgaggtgtaaatcagccggtaacctatccaatgagcatccctcgcccggtatttccgggccagaaccctattttcgaaagtgctccctctgtcaagccggtatatcctcagtccgacgtggatcagacaacacaggaacaggccattgaagcgcacctggctgacttgcaacaacaaatgttgcgcaacgctgaggagagtcgccaagctttggccagagagaaggaacagagagagcgggaagaagcgagaagacacgcgctaaacgctctaggaggtggcaggagtggcaaagacagcaaaagccctgccagcgtaaggagcggcataagcaggaagatgcagccacatgcaaatttccctcccgaggccaagtacgtacataataatgcgggaaacatcaagacttacgaagaagtcagaaaaatgtcgtcgaggcattcaacgacggatcaaagcgaggcatcgagcaagactgccagcagggagacggaaagggaacgtgacgcgccgaagagaaagaccaaggagacgttcgtgaccgacaccaccgggccctcattcggacatttcgggaggcctttctcgcacgagatactcggaggtgctattcctggacacgaacaccgcgggttcatggaagaggaggatatcatctctcctctgggaagtggcgcgcccatactcgttatgcgtcgcgtcgcgcacgaggacatgtcccccgtcggtctggacttgaacgccttgtttggccgaaccggtccgattagagaccatcgctctgcttatgtagagaccgtagatgacgaagaggtcagttgtgttgtgtgttaaatcacattcagggcttcggctcagcttgacgcattccatcagagcccgcacgtcgcagctagcggaacatcagaccgacccccgacttccttgcagtctcgacaccacgttcaagtatcgatgaacaggtctggagatagatctaggtccggagatagtccccagaggaagactaaggggtccaacgactccaatcaaggttcggccatcttcaacgaaacgatcacgccactccccgtcgagtctgcttccgtgccccagccccggccacagctgcggcctccaatctccgttcaccaagctaacaggatgtccaccgcgacaacgaccatgtctctagtcaaccagatcgtgacggattcgcgcttctacgacgattcactttgcgatctcctacgtgccgctcgcgatgacagcctcggagatgccgccaaaaaagccttgaggcgtgccgccagagaacgagttatggatctaacgggcatgaggcaaaagtaccctgtgggtgacctatgtcccctacgtgaccaagtcaaactgatgttcaaagtctacttgctgcagggaaaagccgattcggagaagacagtcactccggctccaagaaaacgttcagacagatcgcctagcgagctagtgagccaaagacacgcataccattctcactcgtctaccgcgttctaatttctcgttattcctctggtaggacgatgaagagcctccggcttggtcaagagccgtaagaatctgaccgtaatgcccggacatatatcattttacagtattgactcgctcgtttgtattacagctgttcgagatgctcgaacacacaaacgcaaggctggatgccctcgattctcgcatatccagcgacgatcagacaagaatctcaggatccctgccagccgaggatgccgaagaagagatggccgcgagagcagctttgcacaatttgctctttcctgacttgcccatggacattccgctgttcggcagcggtccgtacgcgacgccacttcggagccaatttcgcgcagatcatgctcacatcagtgacctccgtacggaagacagaacgatcggacaattgccagattggggttcgtcggtcgagatacccgatggttcatctgtgccaccagcgcttcccggtagagtccctacaaacgcgccgctcgactcgcccatcaccccgactatcaacattcagcctccgactgctcgagcgagtactgcaggaggaatcaagtctcaggctactcatgcgagtcctcgatcttccccgcagggacctactcaagatatcaggtccattgacaattttagtcgcaggaccacgccttctagaatccgagatctcaaggcacccacctcggcgaaagcagagagcagagccgctccagccaaatctgaaacgtcccctggtcaatcggagcaggacaacggagatcccttactaccctctttaccttcgcctcgtccctgggatgtcgttactcaaagactattctcctgggccctggtttggcctcccgaaaactttgtcaggagtctggaaacaactgcgctcggtcatcaggtggatgaattcgctgttacaatctacatgatgacgatcttcaaaaggtgagagttggagatggttatttttcgtctactttccgacagtactgaagccagtggtgtcaccaaaaaggaatctaaggcatcgcatgtgctcggttccccctctaccttgcgacaagctggtatgttattacagctagacctgtcgacgcgccatgtagactgatctctacggccgcatagtttgtcccgccgaatctcgcggatagtatcaatcgcgctgttcaatcggtgagttgggaaatgtggcttccgatgcgtgacaaccgatcgctcgagcctgatcgatgacccgcgtgaggcagaaacggttctcggaagccaagcagatattggaagaactgtggtaccgtatgtgtccaggctcagcagcattcaatgtcttatcactctgtccgctaacactgcgacgccttgtagcctttggtctcaaagaacctcccagggtgatcgtcgcacttgccaagcaccgaaacgacgctaatcattggagcgcgcatcggtgagaagccactcttcttcgttacgtctgcgcattctgtccattgacagaaagacacgttcagcttcgatctaccatcaggcagattagtgaccttctcgtattcaacggaagacaagagcctggtcgatggtcgtgagtccgctccacctctcaaggtcggccgatcactaatctgttattgctatcaacacggctacaggcccattcatgtgtatgttcacacctactctggcctttttgtgtctcgtactgacgtgatggactcatcaacagggtggttcccaatccgcgatgcttggtctacctggaacattccccatcctgatcacctcgcgcaaaagactcagcgcgtgatcaccccagaatcgagtaaagaggacaatgcgctcatggctgcaaattgcgcacgaaatctcttgctgggatggaagcccgaccagatgactgatctcaagaaattgagaaacaacatttggaacgaggtgagttttgacgagctcgatttgagtgagatgcgattcatgacggctggtttgcttctgcagaccaagagactgtatgagaggaaagcgaagggaaagttggtagtggactcgagagattactaggttgtcagatagaatatctcttgacaggaaacacaatgaccacctccaggcacattgtaacccgatcatttattagttttcccggtcacgccatgccgaagggactatttgacacgtcacacacttggatcgacgcgttttgcttcccttttcttgatatcgatcgacttggaatttggagtttccgccgctcggcacctcgaacctcttcaactatctagttgtcgaggtggacgtaggattgcattcgacgttcaatctaaagatactcatcgaaggtctctaagccatctagctagctccatctattcagaatctcatcaagccattctcatcagctctccacccacaacgagtgagtcataccatgctttaatcagctcgagctctcggacgacctcgagacatctatcgaaaagagaccctcctttgcgtcatcgggcgctcctgagcttcttttcccaggctcgaggttgttcagttcggagattttcgtcgatactgctatcaaaattgggccgattgctgatgcacagccttcctgtttcacactccgtgcgcgtctagtagaccttaccacaagaaaaatgacttcgccctccttgcaattcgtgcctcaatggctgaagaaaccaacaactccaggtttggattctcctatggccaactctgcctttgcgtttggaaacggtcctgcatcacctcgacatcctctcggagcgggcgtggggatcgctcaagcggtcgctcagagcgagagagaagagttctccctccatctgcctacgaataacctcagtaatgggcagaccaatgggaagcaggcaaaggctggacgtggcaaggggatccgtccgcaacgctactccaaggaccagatgatgtccttgatcgatgcggaaaagtcccgtcacctgccgaatgatctggttgaatggacgatcgagctgggtatcaatggggctggaagcgtcctgggtcagcatggtgccagcctcgagaatggcgagggtgatgaattggatggccagaccgaagaggagcgcagggtatgtcctggctgcggtcccgtctgccttttgcgcgtgtaggttgggcgaaagccttactgattgaaaacggtttgactcaggcttatcctcagaaacgatacgccgatcgcgaccgtcaggatccttcgacccgtcaaggtcgtggaaccgcttctggtctcaatagtcccgacatctcccgtgcaaccggtcgagctctcggattcggccgtggagagggaggcggtgcgtttggaggcagcggtgacagccatgccaagggcagcaaccgattcggtatcctcgatggcgaacctaccgagtctcctgtgagggagaggagagaaaggaacccttggagagacgccgagactgggttcagggatcgggacaggcaggaacgccacgagaaggccgagagggagaatggtggaatgagcgggggcgggagatacattcctgccgctgctggttacgccagtcccgttgttgagaaggccgggctcggcgagaggagaggtgtgaggggcgctttgctcaggcgggacactgttgaagctggtcagtcgaaacatcctatgtcgtagacgactcacacacccgtttctgactcgttccccttcatggtcgtgacaaaaatagacaaggaagtctcggctccgacccgaaacctcaactcggcctcgtccgcttggcgaccgaatgttaggagcacgccttccagcgctactgcggcgttcgaaggcgtccttgggagcttcggtagtgcactcaacaccccctcaaggcaaaagggcatgtccgaaggcgggattctcgaccatcagacgaaccagtccgcttggaaggagagggaacgaacgaccagttcgagcgacatggctgctggtattcttccgggatccggtggtggacccggttggggcaagactggcaggtggcgctccgctgctcagcaacaagaggatgaggatgcttcgaaggtgagtaggaccggcttcaacctcgtagctattcaggcaggcttacggaggggtcttgaatccctattcagcgtcccaacattgctcccctggccgataaatcggacgatcccaaaccgactgaatcgactgcggtgatcccgtctactaccccagtagcggagagagatcatcaactcgaagagccggagacagccgctgcagaacacaacgcatctgctgtcatcgacgatggccaggcaagtcagattcgcccagactctggcaggcaacaaccggaccctgctaccatcgattggttttaccgagatccgtttggcaacgaacagggtaagtttctggtcgtaagcttcaatcattcaggagcgcaaagttgagttcggccggtcgactcgtgacaggtcctttcgtcgctactcagatgcaagaatggttcaccgccaattacttcaagaacgatctgccgcttcgacggtcgtttgaaagctctttccgcacattggaggttctcaaggaagaaacgcaaagcgatagccagccgttcttgactcgtcccgccccgaaattaccgcccaacttgcctattcccgctctcgcctctaatgcaccgacgccgcaagcaatacaccctggcattcagaatgaacctactcgactagcaccgcagaatgatactctccgtcaaatgttggccgagcttcagcagaaccagacgccctcggaagcaaggaatctgcagacgccgttgaggaacggcatgttgggagcctcgtcgcccggtatcagcgtcaaccgtccggtcatcgaccctttcgtccacagcgccagctatgcatcctccccggtctcccagcacgctggcccagttcgatccgtctgggacagtgcgccatcgcctgccatcggtagaccctcgatccctacgagtccatttgctcctgaagtgatcgccggcgtacagcacatgggaggcttccctcagcctcaattcgcgcaacaaaggtccatcttcgacgcgcaacatgcccagccccaatcgccgtatgccccatctccctggggcatacagatgccaccgcagatgccgcaacacatgcagcaaccctcttatccttcgagtccattcggacagatccctcaacagccctttggccaattcccggctcagcctatggctcaagcgtggcagaatgcacaattcgctccaccccagaacatggggtcccccgcgccaatgagtgctcagcctcaacagcagtacatgcctcaagatgcccagatggcgcagccgcaaaacgactcggcccagcagacattctctccttcgcccgtcccggcacagttgagcacggatctaatgaagtcgcctgtcaaggctgacgagaagctcgagcaatcagctgcagcagttgcagagcagcagacgcccgtcgcggcggcagagcctgtacctgtggttgagccaacccccatggagcaaactaagcctgaagccattcggtcgcccaagccatcggtcgcccctgtacccgcggccgcaccagtatctgcgccaaaagctgctcctaccgatgtcaagaaagaaggcaaagcgcctgagcttgcatctgagcctgcaattccatccgagtcgcgagcatcgtcccctcctgttgccgtcgctcccagcgtagctccttgggctgccgaagacaaggccaaacctgccaagtccatgtcgctcaaagaaatccaggaagcggaagctcgagtcgcagagaagaagaggtcggcagaggccaaagccaaggcggctcttgcagcttctcaaccggttgtcgagagctccgaaccccttcagcaaatgagctttggtctggcttctaggcccgctttgaacacggcgaccagtgtctcctccaacacgtccgcgccggtgtggggcgccacgcctgccgtcggatccaagaaacagatgccgaagaggacgctccagcagattcaagaggaagaacgtgccaagaaggtgagcggaaacatttcccctagcagctttctgtgactcatgaccagcgcgtattcatagttggcacaggtcaaggctgccgctgccgctggcttcgccgaatccgctcaagcagcctcgacgaagcgaggctacgccgatctggccgctactagcccttcgcctgctgtaagattcacagctaggccccttctttgatatagtgtggctgatctgggactttcgacataggctgctggaggttgggcgacagtcggtgctggtggaaaagctgttggagccgttagcaccccggctatcactgctgctgccgctgccaagcccaagcctgttgccgccgctagtatggtcactggcgtcgtctcgaacaaagccagcgctaccaagccgaagtcccaaacgctcaacgaggttagcccctcgatcgagttcgtcaggtggactaaggagcagcttaagggcctcaccggtgcgaacggtaagtggtcaggtgctactgaagatctcacaagtcctttccgatttgtctgctgacaagatcctttagtcgacgagttcatacaaatgctcttgacgttcccagtcgaaccgcctcacaaggacgagatgcttgaaatcattgcagaatccgtatacgccaactcttccaccctggacggcaagcgatttgcaaacaacttttacatgcgccgcaaggaggacgcgattgaccgtgtggcttcgaacggtaaatcgacagccgccaaggtcacgtctttggccgacagtgagtccatgacaagttgaagctggacggcggacaatgcactgacacagcctgtcttcagtcgtgaaaacccagcccaaggctccgggaagtgactttggattcaaggtggtcaagaagaagggaaagaagaactagaggactctgagatctctccgatgcgcccgtgctgtcatcgtcgcttggtacaggagcggcaacatttgcattgaatataacatgattggatacgcatctatagtttggttgtttaagctttcggtcgagtgaccccgccgccaaacatgactcgcggcgcgtcacttgcttgcagctgcttttcgcggtttgggtttcgagcttggtcgtagatttcctctgttcattatcggtagcgcctccttaagcgacttcttcctttgtatatcttgtaaggacttgcggacttggtcgactagctgagacattggtagagaatacacgatggactgcaactgagcagaataacaatatcctgaagcgaacgggcggcgaattgtttagacctccctttctggaagaacggggttttcgaaacagaactcacccttcaatagtaagcttgcattggcctcgccaattgattgtgagggcgacggtacagttatctgagctggatcaccgctcgctcgagcgtcccgggtcaaaactaatcggacggcctctttgaacctggtcctgacgcgatttctttggactgctcgtttagagatgcccttgatggtcgtcatcaccgcgaaaggggtgaactcgtttggtggacgacgagctggaccgaatggcgaagcctcaggcatgggtaagacggatatgggaacagctcgtatgtagaaggacgagctatagctcgagatgcccttggagtgtcccgctagagccttgccggccgttgtccattgcaccttgcatagctggagtgcgctcacgttaacaaggatcgccaacaggacgtgaaaatctcaccttgagaacattcttgctcggaggcaagttgttcagaggaaggacgttcgtctcttttgtccgctcgatctttacgggcgagatcgctcttcccttcaatggcaactttacgagcttctggctaggacctgtatgtaacctcgaacatgcttgtagcctaatgatccaggtagcgcgcatgccgagtccagtcggacaggcttatgcccaggtccgggggctttaataggcttttgatgacaccacgatacggactgccacaaatatgctggttcgtggtgtcccttccgactgtctcaacagggaaagcaagtcaagagagttccaaagaggttcatgttctgattttactttcggtccatccggcgcgcgaaatgtctttcgcacatgtccgatggcggcacgaggggtccgctgaggctcacatgaacctctatctcctcaagtctatccaagcttctagcttctcggtcaacaagtcaggtctgctaatcacggtgctggtcgagctcaggaacaccgcctctcgagagctgtatcagtagattcatcaagatgacccgagctcaattcgtcctagaggacgacgatgatacagagggtcgacgtctcggaagttctgagttgccgaggtactctgaggacagcatcgacgagctcgccctggaccgcgcggtctttgagaaggatgagcggttcagagatgagggcaagatggagcagggagaggaagaagatgatggtttcctttacggaaaggtgccggtaaggccgattatgaacgaccggtcaacagcgcaatgagtgactgatcgaattgccgttgacccatctatctagtcgcgaaaacaacccagaaagccctttatcgctctgctgctcttgatactggctttggctgccttgatcggtatcttctcggccagggcgttcaaagccccgacgtggatcaagaaaggcggcaacaagcacatcaccatggatcatgtcttcaacgggacgttcgccatcaagtcgaaacggatcgattgggtcaaagaaggtgggactgtgctccatgtcgtctgttgctcgctcgcatacttaagaatatgctcccacagctagcgatggtgtgtactcgcaccgcacggaagaaggcgacattatacttcaagacgctagcaagccggactacgaggaggtactcttaaacgcgactgacgtgagggaggtaagactgtcgactagctagatctgacagggtggaaatgtagctaactgttcctgcttcaggctaccggaagtcagttgatgttccaggattggagactctctgcggacatgcgatatgttgccctgaagacggactaccgcaaggtgaatgattacgtctgctcttgcgcaccgcgctgaatacaacactgacactttctgtgatgtttgctgacatagctctggaggcattcttcgtatggcaacttcgtatgtcgccttgtcttggcaactttaccttgagcctgaccgatcgttatttcactcggcattcgctcagtacattcatcggttgtcggatcacaagaccttttcgctacgattgccctcacacccggctgagatcgcttacgttgactggtcaccgacctcgcactcgatcgcatatgtctacaagaacaacctctatgttgttcctgcaaaggatctcgatgctctggagacagtagggcaagtcccagaagctattcaggtcaccaaggatggaagcgacaccattttcaatggtgtgccagattgggtgtacgaagaagaggtgcgctagtcaccacaatgcgcggcttcttgctcaagcagctaagatttgtgtgtcccgctgtcacacaggtcttttcgaaaaactttgccttctggtggagtccgcagagcgagattattgcgtaccttcgcagtgacgaaaccgcagtaaaagattacactttacaatactacaatccaaccggagcggcctttgacccgtcaccctatcccgaaaatttcgtgatgaagtaaatatagaacggtcagcgattgagccgagttcgatctgatacaggcgttcaaccctacaggtatcccaagcctggttcgccgaaccctattgtctcggtccacatgttttcgctgcaggggcaccttgctagtgcctcgatcaaggactcgaacaagcaactgcagtgggaggggtcaatgcctttggacaagcgcatcattgccgaagtcagctggcttggaaacgaggatctcttggtcaaagaagtcgatcgctccgccaagaagggcaacatcgtgcttttcgctggcggtaacgtcaagggcaaagtcgttcgtaaattgggcaaagaaggagaggaaggagatgatggctggatcgaccacgtatgttcgtgagcacgcgattggcttgaaacacccattagacgcatttgcatcttgcagaatcaacaagccatcccagtcaaaggaaccgacggttacctagacatcgttccgactaaggatgggtttaatcatatcgcattcttccccactcttggttcatcggaacccatctttgtcactgagggagagtgggaagtcgcagacggcatcggcggcgttgatcagaatcgaaaattggtgtaagtcgaagctggagttcgtcgggatcgcttccaagcttccaagactaattactccgaatttctagatatttcctcgctgcttcgccagataccgagcgtcacttgtatcaagctcgcttgcctgagatcggcgtgatgggtgacttcgcctccaacatgactgcactcacggacactagcgtgccgggataccacagcgctagcttctcgccgcagagcggtttttatgtcctcaactacctcggacccgatgtaccgaagcagaccttggtcacggttgatgagccaggtaaggccgcctttcgtggagcatacagcgatgcggttgacatatcgtaatccacacagatctcgacgtgatcattgaggacaacgctgcactcaacgctacgtccgccgagttctgtatgcccattcggagtcattcggtcatccagagcgacggagttggtaagctttgagcttgctgagcggttgcgcgattcggtctagctgacatgactcacgcttaccggtagacatcaacgtcgtcgagaccttgccacccaactttgaggcttctggcagaaagaagtatcctgtgcttctgaatccttatggtggaccaggatcacaatccgtcaaccagaaattcgctcgagattggcatcaccacctcgtctgcgagcacaagattatcgtactcactgtcgacaacagaggtaccggattcaagggacgctcgttccgcaattgggtacgcgacgatctcgggcgatacgagacgatcgaccagatcaacgctgccaaggagtgggccaagaggcgatatatcgataacaaaaagatcgggatttggggctgggtgagaagatccactttcacagatccatcagccgttttctgacaaccagtctcgtagagcttcggcggttatctcacgagcaaggtcattgaagccgactctggtatcttcaccttgggtagtgagtacgactcgagtgtcgagccattatctaagctgacatgcagtgctgcattccactattcagtggctgtcgccccaggtaagccgacatccggttgcttgccgtccggcgggctccgtactaacgtgctactttcacagtcaccaactggctgtattacgactcaatctacactgaacggtacatgagcacgccggaggaaaacgaacaaggatacatcggttctgctgtcaacaacgtgactgctttcgaacatgccgacttcctactggcccatggaagtggtgacgataacgtccattatgccaacaccgccaacctgctcgaaaagtttacccaggcacaggtcagaggcttccgattcaggatgttcaccgactcgtcagtagcaccttgatatcgtggatccaccaattcggcgctgacgttgttatccgatgcatctttcattagtgaccattcgatgtctgggttccgcgcctaccgggaagtctatgagtttatgactgcattcttggatgagaaatggagtggcaacaggaaggttcatgactagagtctaacgtcgctctagcgaagcttctgtatatccgatgggatcaaggtatccatccaagcgtcctatgtagcaatgatcatatcgtgtcggcgcatcacaaggggacgtaagaggtgcgctgatagcaaattgcagcgcaaggatcataacgtggggatcaaattcattcagcgtaatcattccgaagacgaatgactgcggggtcactgttgtcagatatcatgagaggtcccgcgagatttgtcgtgcatgatggctagataccgtaaaatcgccgacaaaaggcgattgtcaaaaaggtaaaaaagtatttcctaccggggagtcgaaccccgccctcgcgcgttcaagatctgacgaagaagaatgagaggcgcgcatcctagccgatagacgagtaagaacttcatgttaacgtttcttttttgaaattaatattttgtcactcagccacaacaccgcggcgtgaatctttcctaatcgctgatcagacctttgctgttcgttggcgcagtgaccacctcatcggagtaatacgatgaaagccgtgcatgcgctcttgtaatatatacaatcatgctgggccgtggctgatccaccggcaattggctcttgcgtccgagaagggctgggtgacatatcaccacatgacgccgtattcgtccggccggacagataacgtgcgcatcagaatgcatgcatcggacctgcattggccaagtagaacgtacacggagactggcagcaagcatgtgttccgctgcgtccagaaagaatctcgccttcatcgttagcaccagatcccgatgaaatcgcaaacattcccagggaccttggtgttatcgagcacgatagccgaacccctttgatgattcacaatgacgtcagacatccccgatgttcgagcctcgacgagatagaactataaagtttcaactcgaccatgattcttcgctcaagattctgcagactggcgaacagtacgagcggctcaatcattgtgacgtcattcttcacttcgcgttcagtcccgcgatcacgataaaacaagatgaactctggatctctttccgtcagtacgtcgcactttcagacgaatctgaccggcccaggaagtcccacaaccctgatggcaatcgtattcctacgaccaaggcgaccccaaagttcaggaggctgaattgaagtacggggaacaacccaaagggccaggagcatccgccgaaaatcccgccggcgtacgtccttccttgtctcgcaacgtcctacttcggttcgcctgcgactaatttcaccttgtataatcggcgagcgctcaggttttccctcaagtagctcccgagccggctcaagcttcccaccaacccgcagcggaccagccgattacgcagtctggtgccattcaggcaggtggagatgtacctggaacggaaggtccaactggcacggccatggacccaaggctgacattctccgacgtgagtccgagatcgcaatcgcgcctggttatggttctagcaacttgacctgtttccaatttcgcgcttgtagccgatggcgttctcggaactcatgaccaagctcgatcactcgctcaccgaagctatcaatgcaattgaagacgagagtggctcaggactgtcaaatgtcgggcgggcactgcaggagaaattcaaaggttggagagaggaggtgaatgatgtgagttctgatagagggttctcaatattacatgagccatacttatggtctcttctgttcccacttagatgcgtaagggcaaacccatggcccctcactcagaacacgtacatgcgatcgcggacagcagcagcactgctgagccgagcggtctcttcgccgattgatcgaatttttgcagacaacggcaggtgctacacggcgtcttgtgcatagctgaacagccggtgtgtgattttctagtcatcttagtcatatgtggtcatgagctatacaaagtcaaagctgatgtatgtttcacggttcgaagtattgcaaccagaacgtcgcgttttgtcacgctgcgttacgcattgcggaaatcgattacgagatgaccaattgctcacatcgcaacttcagtcacgagcgacccctcacagccgggtagaccgatacgagcggatcaaaggatccggggttgacgtcgagttataattacgcagcccccgcaggggttgtcgtttctcccgaccgcgggcgttttgccagttgagagattgaggtcaagttcattggctggcaaaagtagctcgttgtatcctctgaatgcgcgcgcgtcctggtggctctcgtcccaaaacgggcaaatcccaattcgaggtggattcaatcgctcacaccgcatggagccatagcacgtagaaacgttgtactatggtgcgggcagtgaatataatcatgcacatgttgtggagcgagaagcactggcccatccgtgtctgcttcgtgacggtcattatcatcgtcaatcattccagaatcgagtttgaatcgggcgctttacctggtatttgattcgagctttgtttggttcgttccccggtcgatcgacagggaggcaaaagacgcatccgcggatccagaagagaaattgtcagtcagtgagtgagtccgtgattccgtgggtcggggatacctagccctgctcgcctcgccgtctctctctcgtggcttccttgccccttgcccctgcctttccttccctccctctcgcgcgctctcgctcgtagaggcaagtcgtctctctctctctcttccgcgcagcttttgtaagcgaccaaaccacaaaggcaaaatccacgctcgtcagccagacccagatcaaggtagagtgggctgagtcgagccggcctgcatcaccagtcatatcatcatcatcatcggcaccttgcaccttgattgggaagagatattcagattgtcaatctgatcaacatcacctgttcagcgaacggatcgtcgtttctccatcgcccctgctgacatatcgcgtaccgacctagaatcactaccaaccatccggcccaagctcggtcatagccgtactttaaatcacgacctaggaggaaaaaccgacgcaatcccgcagtcgactcgaccttcatccagtctctcatcaagggtctaaattgcaacacataactgccgaactagatcatgagcttttgctgacactaggaagcacacacgtcaacggtaccgtttgtctccatcaaacaacaagccactcgacaggggtctattttccgcgttcccattcgttcgggaagccttttcggaggtagcgatcatccactcctctttgccactcgcatcttcatcgaactttaacggcctttgccaggtcaaatagtcggctctcgacactacccttgataacggacacgacctcttccaactttagggcggaatcgagaggaatcatgtcgcattcaggcgaaccgagcaagatgtccgcggtgttagaggatgtggcagaagaagccgaaccagagatacgcaatggacaagaggtcagttgttctctctgttcgattgctgcctttgccttgctccgtgtttgtactgattgtcgattgctacattcctgtcctggacaccgctcccttgctattctgatatctggtcgcgatcttgacacgccactccttacatatggcagttcgcacccgtcaaggtctctgacaacaccgcttggacctcccagtccaacacgcctccagaatcactcgcccgtcacctgcaacaatctctcaatgtatccaataccgccactgcggccagtacgcccgctaataattcgccacacggcacccctcccttgatccaacccaaggacttgcattccggcgagatcgccttgcccagagagacgtatagaggtctctctaaagaatccgagatccagactcccgggtttggaagtaccgtcggcacgcctggaagcggcggtctcgccacgggtctcgccacggctggggggacggcggctatctctactggcacagctgatcccaactcgcctaatgtggctttcccattcccttcgtgtcagtacctgttctgagctgtttgcacctcgcggttgagagcagtggcactaatttcgttacatgctctttttcattccgtacctatgctggtcgctctcggccatcgtttgttgaatgatgttacttctaccgctgctgcgcagtcaaacccatctcgtcgaacggatcgagcccggaacctcacgatatgactatcccccctactcccggcggtggcttgtcgcgggaagcgtcgaccaccggcgtcactagacactcccagctcgccacctcgagcatcaccgctgccgacttgcatgcatcggcgcctacgtctctccctcaggcgcacgtctcaagacgcaacacttcaggcggctcgcataaccaagttcatgctcctcagcctcaacgatcttcgtctcagaaacccatcatgctgggacacggtggagagaagaagtccttcttgcacaagatgttgcatatgggggaagacaagaaggagagagctgccagagaacgtctcgagcattccgatagccagtatggcaacggcatgaaagtcgagcttcccgacaggaagcccaacgggttcggtacccctggcgcgcgagattcacctcctggcagtcccggcccgatcagccccgggtacagcgacggtgatcacggctcgcaacccggttccaagcctcctagccgacatcccagcgtcaagaggcagaacagctggaagaatcacgatgatccccatgcgcaaggaccgaccgataagcagagtcatctcggcaacacggcatctccccgaccggggtccgaacgtagtccgtctcgtggacctaccggccgagcccccagcgtcaaggagggcgataccggtgggacaaagttcaagctgagcgacctcttgggttcgggtcccaagctcgccaggaaagcttccgctgctggttccgccaagggcagcgagaaaggcagtacccgggggagcgaaaagggcgacaacgccagcaccgccagcttgttcaagaaatacggagtttgcgaaaaggccgccatcggtcgaggcgctaccgctgtcgtcaagctggcacacaagtgggatcggtcagaagagaaactttacgccgtgaaggtgagtcccgcgttgaatagtatgtgaccgattccaagttgtgcttatcgtcaccgtcacgcccggcaccatctaggaattccggaaacggcggaagaacgagtccgagaaggagtatgtcaagaagctcacttccgaattctgcatctcgtcgaccttgcatcataccaatgtcgtcgaaaccgtggatctggttcaagatgagcaacatcattggtgcgaggtcatggagtactgtcccggtggagacctctacgccgccattaagaagggaaacatgagcgtcggcgaggtcgagtgctgcttcaagcagatcctcaaaggtgtcgaatatctacactctatgggtgtcgctcatcgagatatcaagccggagaacctgttgcttgatggtcggggtcacgtcaaggtcagtctgcgtggcgttgttttggtgttggagaggaaggctgatcgacgaccttgtccagatcaccgactttggtgtttccgacgtcttcaggatgtgctgggagaagaagacgcatttgagtaagggcttgtgcggaagcgagccttatattgcgcccgagcaattcgagcagaaaggtaagcgagtttcgtaatgatgagcgcaaaatgcagtccttcaacctaacctggtctttctcgctaaatttagaatacgacgctcgtgcggtcgatatctgggcctgcgccatcgtcttttactgcatgcagttccaagaaatcccttggaggatcgccaagaacccgtccgactcgtcgtacgctcaatacgtgaaccaatacgcgcaatcctcggcccctcaacctctgcacaacttgatgcccaaggagtgtcactcgatcttgaaaaagatgttgaacccggatcccaagttgcggccctcgatagaggacgtcctcaaggatgactgggtcgtccagatcgaacaatgcaaggacggcaagtcgaagaatggccacactcacgagggagcgccttatgccctttcttaggggacgggagagagacagacggcgagaatagaatggacggctgaaggactagcctgcgagggaaggatggacgaggaggcaaacgaaattcactttctcaggatcacgataacgaggttcccggatcctccatcagattggcaggagggatcaagcggaggcgccgcaggatgaacgccttttctcgaccctacgattcctgcgccgtaattgacgaaacgcatagagagcagaacaggatccgagggacgggacggcgaagacgttgtcgcggtccgctcacgcccgcatcgacgtggtccaccttatggctgtgacacgatcattcagccaagcctcctgctgctgcggccttttctctctcttgcgagccacgaacgcctcggagctttagctgtagtaatgtttttattcttatttccgaattagctatatacatgtgcattatcagttcgttttgacattcgggctacgatcgccatttcggactcgaatctcgagatggcactacagaaatcttccgacaagcaagccgtctccaagctctagaatggctttatgtccgagcgttgcgagaaagctgcaggcgagaaggagatggcacggcactcggggaagcagaagaaattctctgagcttctgagccatccgcagttgcctcttgggggaatgccgtgccaaggcctagagctaccgggggaatcaaccgcacggcgtgggagccagcggcccgatgctggggtgtctcgtctcccggctttcgcgccgcgcgggcctttgctcccaaacagccgtttcgcttccgacacacgatttacgagagatacgttcctgtctttgactgtacagtcccctgctttccaccctctctagctctctacgtctgaatcaaggtttgatcttgttttgatgagatatgcgcgtcgggaacaaaaacaaacaatagagacctgctctcatcctatgactctaggggactctgatcgatctcgcgatcaattcccagtcttttcccgtagagatacctccccgtaaatcaacagtgccgtccatcacgcaccctcgttttctccttcatcaagttttatcatcgcacaagacccaccaccgctcgttacagtttcgacaatccctttcgacccgcccgaaccccccttttcaatctcgtttcggtcctttaatcaatcaattctccatcaaacccttgatacttgatcgcgtcgtcgtagaacgtagactcgatcccatcacctcgaatcacaagtagacttgcatattttgcattcgactttgactattgatcaacatcaagtctcgacctactcgaccacactccctatcaataccgaacccgtatcagtctagcaacaatgagaggagaatgtaagtcttcatccgagatcatgctttgacattgaagtcgttccttgggctgacgacgcttttgccctctcatcagactgtatcgccggagcatccgtcttctcgtgagtcttttcgggtgaccatttattggcgggaccatgctcacgatcccgctcgcacgactcgcaggttcatctcggtcgtcttgatggtctttgcgatcgtgagtacacgagtcggcagatgcgacctcgtcagctttccggaagctgattcatttatcccttttttccagatcggacaagttaacccgacttcggtacgccaacaaacacttaccctgtaggcctgcgcgcagcccggctcacgagccctctaccttgtacatagctccctaagtccatctacatggtcaaggtcgacgtcgccgcctacggtgccggtctgcaaaacgctttgaaggccgcgcccagcggtctctacatgtccaacggttcggcccctctcggaaagaacaccggtctccgacaggagtaccgatggggcgtcctcaactcgtgtggatacgccaaggagggcgggatctgcaactctacccgattccccgtcgagttccaacccctcgagaccatcttgagcgacacccctatgaagttcttcattcagtgagtttaggtggggcggtattgattgacgaagtaggttctgatgggttgtgacttcgccaggaccaacgacatcatccccgatgaggctgacaagttccgaagcgagagcttcaacggcaacttgtcaaagatcggattcatcctcatggttgtaagtgtcttctcggcacgtagcaggctcgtgacgacaaagctgaccggatctcacgtgctcgttcccccaaggtcggaggcgccgccgcgctcgtagctctgatcttcggtgttatccccaaccgtttgacctttgcaatctcgaccgtcatggccatcatcgccaccttgactttgctggtgtacgttccgacagcgatccaaggaacgcttggttgtccgacatgcagaggctgaccatcggcattcactttacagcggtgctgctatctggactgccatcatcaagcaggacgaattcattaacaaggttcaagtcgaaggaaagaagcctctcggcattgtcgtctcagccggtcccgctctttgtgagtcttccgccactcctccgcctgcgccggatcgcacgcactgactttagttgcgcctgaaatcagacttgacctgggtcgctttcgccttctctttgctctcgatcgtgccctacttggtctcgtgctgcacctaccgacgaaactgagtcgtctcatcctgagccttttggtccaaggggtcacgcagtcatcgaacagaaacgaaagacctggtttctctggtagccgccaggtcgtgtcgcgctgtgatctttctgtactccttcccttggctctgtcgccaatctctcggtctctctcaggcttacaatactctaccctcctcaaaaggaccttccccttatatatatgctccctttcggctctctctgtcatctggacctttcagtggtatacccgtaccgtctcactctcgttatgtaaatcgtttgtcgtcttgtatttacgctctgctagtcccgcaataaggatatcattcagtgctcgatcgtcagggcacgatggtgatctgcgcgattgatgatcgtctggacctgccagcaatacgtattacaggactcgaagctggagcgagatggtctggctatgcggtccccctcaagccttgtctaggtacagattacctagtgcattgggtgtaccgtccgcgttcatgatcccattagcattgccgctaatattgccggaaccatcagatgaattccctttcatcaaacaagcgcaacacgactcacgatgaggcagtgctcagaaaagcgccgaaccaagaatacctctcgacattgttggccgggttctccatgtcgctcttgacctgcttcatgaaagccgtggtttcggcttcggtgcagacgtacttgccaccgttgctgaattccatgcaagcgacctatggcccgacaaaaaatctgagcgctgactcgaggactttactttggcggtggtgcgtacctcagtgacccaaagaggcttgccgaaggcggacatttcttgctgcgaaacgagttcttataagcgttgggtccactcgatctccttggaacggcgacgatgtgtaacgaaccaagtaaccggcgaaaacagaggcatctcggcctatttcacagtcaattcgaatgtgagcatttcttgcttcgagcatatgcgagtactgaaagagattctgcgaaccatagaagtggatcggtacgaaatcgtaagcgcacccgccggcacaagcggcttcccaatcctatattggccacatcgtctatcagtgttttcttctgttttactcttatcgaaattcacgtacgctgagccattgctttccgtcccgagctacagccggcgaccctaccttgtacttggaggcaacgtcggccgtaaaaacctgcttgtgaactgcagccccagtcgcggcgtccgtggcggatccgccgtccccacgaccgatatcgggctcgttaaagctcagcaaatgagtgacgccccaggcgtcaaagttggcgagatctgcgttgaatttggtgaccttgtcggcatcggaccccctatcgtgcgacacacgaggctgtcagatctcggctcctcggaattacaatgcaatacctaccagagctgtgggacgtattcgatagacgagggcaacccggctggaggcgcgcttgcccagttgtacaacctatcgtcagccgggaccaggagataattagcacctacttatatccagtcactctctagagaactgaccagctgaccgtacctccggtccaagaatcccacgagcttccggattcaccgttgacagccaagccagcctttccagaagacgaggaaccagtagcaggagccgggctagctggtggagcggccacgctagaggtcggtgcggcaggagcaggaacattggatgcgggaacgggcgccgccgcggtcggagcgagtgcctgctgtgtagtcggcaaatcggagggatcgacaatcgggccgcttccaggattgccccagatggtcgaggcgggctcaggcacgggagcaaccggggccggagcggtttcagcgttggctgagggtacagctgaaggcctatgtcctcctcttcccccgcccggtcggaacgtcatgttgaccggtacggacgcagatgcaccggtctgaagagttgggtacgagggacaggatcggtagttgactcatttcgagtctggacgaaatcacttacttcgaccggagtcgccacactagactcatcggcatagatggggatcagctggataccggacaaagactcggtttcggatggttcttgtgcagcagtaaaggtagaggcctcttcctgaaccaaaggcgacgaagtagaggtctcttggactgcagataaggtagtcgaggcttctccgaggtcgtctacgatagtaggtaaggtttcaaggggagcttcgttctcacttccggatggacccaggagtgttccgagggcgccgttttgcaaggaagtgatactactcccatcgttcaagggccatgaaggctccgcttcctgcttgtcagatggagaaccgtcgtcatcctttccgtaagagccaaaggacccccatccatacctgccccacgccccctggcggccagcaccagcgaccgcggcctagatgggcatcaaagctcaattcgagtcgagaattcctttgtgcttccgctcgccacttacctgctcatctacggccatgtgacgagcacattcgacacgcttcttgagttcctcgactggccgggcgtctgttgccaatgtggctaggacaccgaacagagcgatcgtgcggatagatggcattctaggagagatactgaagtgtattgtgcgagcacagactagctgtatagtgatcagagatataaatgaacgtaatcgagtcggttgttcgcgtctagcgattagagaaacagaagtgaaaagatgtgttgccaattggcgactgaatggtcgacgagagaatcagcaacagtcaggtgatgatgccttttgtatattacttttttcagctccacagatcctttcactctccacagcaggtcagtccggttatcgttaaccacgtaccaaagtttccccataaattaaaaccccttaatggtgtttcaaaaataaaatgaatttggacccctgatcgcttccccttcctttcacttgctgaaacgtgtgtcagtggctttgcgtattcacgcgcgtttcagtcattcacacacggccctcgttctcgtctcgaatttagctttcgggcatcacatcgggctcgaagccaatttacttcttgcgccgggagattcattaaagttttgattctgaaccgctcgaacatacagacggttctactcgctatctgttctatccgcgtcgctatccagatcgatcgtccgcggtctgacccgtgtagccatggtaggcgaggtggacgacgacaaccgtctctgcacgggcgatgtagtcttcctttgagaaaccctttcttccactaccatcggagtcattgtttcctttggcgatgcggcttcctttgggacatacgttcggcttgccgagcccgatcgatggggaggatcgtccagttgatcatcgtcatcagggtttccgcccatttcgatgtcgccgaggtcgttattttcgtcagcattagagctgccggcgtcgttgacttggtctcttcgtttggtattgtcgttatcataaatgtcgttttcataattgtcgttctcggcatcgtagcggagtctctcgttatccgatggtcgcgcgttcgtgggtatttcgtcttcagaggtgtcgttaatgatttcgagggatttgaaggttaagccgttcgtaactggtggtcgtgatttgttccgtcgcgcattcccagccttacggtcgggaacattcaagaatctcgccgctctccatgaatgtctgcgtcgtttcttgaggagcgtgatgcgttctacagtattcaaaggacagatttgcaatcagtgaccagaatagacgcaagcgaagatgatctgccgacctttctcgagttgagcaatctccactgctctcgcatggtcagatggctgttcggcaggtgtatcctcctcgggctcgtcttcccattgctcctggtgcataatcgtttcatcttcggcattcccctcgccggcctggagcaaagcggagttgccgtccccctcgctctggtcaccttcaatcttggcctttcttccagacgaattccgtagagttccctcgtccaccttccagtttttcctcagacgagtgatgtagcccgtttcggcctcgtatacgctccaatcgaaacgttccgcaaacattggaacttcattgagcccgcgcagatcggtattaaatcgcgcatccagatggtcctcgtgttcccggtccctgagcgtgtccaggcggtcttgcaattgctcgacctgtttcgccagctcatcctctgcttcggcctcctcctcagtctcgagccctttgtcgtcctccccactaatctgtctggacgagccgggcagaaccacgcgaccataagaagggttaattatcccccgggccacattgggaacgacatcctccgcccatgccacgttaccagcttcgccttcgcggacgggcaaggaaggcagcatgtgtcttacagtgaacggctcgaggtgtttccacttgttctctttaggaggaatcatgcgggccagaccgatctgttccatggcggtaaagacgacctgagcgttgacgcttagccgaagatcgtcttccaatccgggacgggatgccgcatacccttctccgacgtagatgacccgcataaggagccgatgcagaaatacgtccaggtgagcgtagagcaattggagcacggatgcagagattgaatcgacagaggagtgtgcgcgtcttcctaccctcggggcgagcctgcccaagttgaacatgtcgagcttctcctccttcaacctcgccgtggcctcttttaagatgaccggcacctgatctgggtacagttttgctcgtttgttcggatgacaggattcgatcttttcgagctctttgtgcctggtatggcgctcagatactgcggttttcgagacatcctcgtaaatttgggacaagagcggtcgaagttgatcccgggtcaagagataatcgcgtggtctgttgacacgctcgacttgtactttcacgtcgttcctagcgaaatccttttccggtggttctcccatcggcgtgtcttccgccttgtgctttttcttgacgttgccatcggggagagaacggcgttgtctccgctttcgcttcatgccctgggtcgcgctttcctgcttgatggatccatgcgtgctctctaagtcaacggttgcatcgcgctccatgacaggatcgcctgcaatagagacctcttgcggttcactctggtctgtagtggtctctgtttccaccagctcgacccacttgtcgaacgatttgatctctcgcttcctccttgccatcctactctgcaaagtcgccgcctctgccatttcctgcacggtccatctgtcccggtctatcgagttgagcagacccaaccgggtctcgtccgcttgccatatctgctgtatcgcgcgcatcgtctcgaccgagatgcatccttgctcgtctaccaagtctggctgatccaacggacccttgttcgccaactcgagctcgtcgttggaaagcaaaagcacagagaggtgctgtagtttccgcatcgtcaatgtctctgtgaagtcgtaaacgtcctcgtcgagctcgtgtttcagcgcctgtttgccctgctctaaccggtcttgatagtcctccttcctcagcgccgtcttgagcaggagcgaattcttcccctgagcgtctttgtaagtaggaacctttctcaaccgactcgtccggagggcaaactctgctcgacgagcttcttccctcttctccgcctctcgagcggtctctagacgtacgagccccctcgcgagctcttcctccctctcgacccatccgctcgagacttccctcgctgcgggtgcgaacccgtcttgccagatagacctctcccttgtgccccgatcgggtcgtttggcgcgttcgatctcgctcaggatgcgtagggcatcgaggtaccacccgacctctgcttcagactttgagcctcccatgtcccggctgatgaggtccgggcgccacctcgagcgtctggcgagactgccaaagagacgggatttctcttgatcggaccatgagacgtttgtgggtgggacctgatgttgttcggcatggctgttggaaggagcggtcccgaacggatgggaggcggagaaggctccctcggtcgtagctcctgcgcggtaccgagcgaggtaatcgacatgcaacgagtagtcccgagcgtagcgatcgatttgaaggccagtgggtaccgagctgccctcggtgtgaaaaggttggaaaggtcgtcgagggaggtcatccgggggagaaggggatgtttcgtgcaattgagaactggccggactcgagctcgctcgacgaggttgcgcgggcccgacgatgggcgtttgattcgacccggacggttcgtccgagtctgtctctgactgcatgtgtggaacgaactcgggacgctgctttctgaacgaggatgttttatgtgggttgtctacagttagatacctcagttgtgatagaatatacaaagttgttcttgatttgtgcgcttctagtttgttcctgttcccttgggatgagatgacgcgagcaagcaacgagcaacgagatcatcaaacgcttgtcaatcgattcccataccatacgatacatacacacagttacatagatctttatttgacaacatcaacagtaacacacatacacacatctaacagtctcatagcaaaagggaagaggaagattcaaacatggcttctagatcatcatacgaccggtaagccaacccacctctcgatcgaatatcgtgtcgctcgtctcgttcaagacctaacacccgttcctttgtaccatcttccggtcctgcacagatacttgaccgtcttttcgccagaaggaagggtgagctaccgttcgctccttgaccagcttccaaactgaaccgccgctgaccctctgaaatgcgcaccgatcatgctcgccatcccgacccgtagctgtatcaagtcgaatacgccttcaaggccatctccggttcaggtatcacggccatcgccgtcagggggaaagacacgtcggtcatcatcacccagcgcaaagtacccgtgagtgacttccatctccttgttgctgtgtacatccctgccgccgcgatcgagctcacgcctgggctggaccgtcgaatcggtcaggacaagctcctcgacccggagaccgtcacccacctgttccagatcacaccttccatcggatgcgtcatgaccgggatgatcggtacgttcttggatctcgtgtacaccctccctccctcacgaactggtcgaggagctgatgaggtcacgtcgattgccggaatcaagcggacgcgagggctcaggtgcagaggaccagggcagaggcggccgagtttaggtacaagtttgggtacgagatcaccccggacggatgtgagtcggcgtgttcttcttcaacacggccaacacagaggtgtttgaaaacatttgctgatttacaatgaccttgtccttgtcttcgtcctcgtcctcgtccttgtcgctgatcgggcgggaatctatagtggccaagcgaatggccaacatcaaccaggtgtacacgcaacgagctggcatgcgaccacagggaatcggtcagtctacaggctcgcgcatcatctccttgcgacctcgatgcggcttgaaaagattctgacgcgacgcgaccctcggtctcgtagccatgatcttgatcgggaacgacgccgagctcgggcctcagatattcaagctcgacccggccgggtattacgtcggattcaaggcgacagcggccggacagaaacaaaccgagagtatcaactttgtgagtcgcacctctcctccttgacgggagagagaccccctttccactcgtcacttcgctgaccatccctcccaacgtaccccacgccagttggaaaaacgctggaaacaacaacccgccaacgctcagctcgaccgcgccgccgtcatcgagctcgccatcgaggccctctcctcggtctgcgcgacggatttcaaggcgggcgagatcgagatcgggatctgtagcacggccgaggaagaacccgtccccgagggggtcagcaagggggaaggcttgttcagacagatgggcgaggacgagaggggcgaatggttggtccgcgtcggggagaaggattaggccggctccggcccccttcacccacccagatcacgccgtcatcggtcgggcggggcggtgtcactggacattgccccgctcggtcggctgaagaggatgggatagcctttatgtaatacgatagaaccctccgcctcgttccgctttccctttgtttctcaatttaacgtgtgtctcgtgcatatccaatcttacgaaattcttggtcgatgcgagccggaacggtataggtctgatatggctcgtatacgggttttgtggagactcactcatcgtaacgcgcccgcagtgatcataggatcggtcggatgagaggtaacgaccggccgttgagagcgcaagagctcttgtgatgaagacagtccaggtattcgaggttaaagggacgacgactaggtgaggtcgcttgaacgcgatgaatccgtggcgggctctataggtcagttctgttattgctgtagcagttgcacaacacagcatctttgctggtgtattggtaacattggcgcttgtcatgatatcaactatcaacactactcgcgcccgcgctgggttcgattcccaggcagagagctttctttttgacctttttttccttgcgacgcgtctttcgcaatcatatggctatatcggggcgtcacacttcccgtcgcttgcttgggacggcaagacagcgtcagttgcaatagcctgcccaaatctatactggacgcttcttgtcgtcaacgagacccctgtcttatcggttctccaacatgtcttctccacgttgactgcgccaaggacagacagcgctcaagtggagacgattctcgaggccgcgaacttcgagttatcatgggcttgctgcattccaaaactctcaccagcctgcttctaccaggaagcgcttatgtaccgtcggcgttcactgcatagtttactttgtgatccatcgtggtgctgttggcctcgccgctgtcgcgccttatcatttgaacaagttccgaggcctattcgatattagcgcaaatccagtcgacactctttagcgtctctctcattcggtctggttcgcaacagaaatttgttctgccgtacagtcggcggagcagagatgctcgacatggagcgaaaactcggttccgcgccggccacagttccgatggtatgcaagacgcaaagacgaaagacgaaagacgaagaagaatatgcattgatgaccatgcgaaacgcagtacgatgatccaacatcagaggcaattctattctattgaaccctcgtcgccacgctctctactcatcgcccgacttgttgttgcctacgacggccttttcggcctcttggccctttaggacgggcgcctcgccgtcttcgccgatgagaccgaccttttcgccccgctcgatggccgagacggtctttttcccgggaatgaccatggtcgggggcaagtgggtgagagggggcaagagggcggcggcggcggtccgggcgttttgagcgaggacggcactgcgaacaatgccgaagcgtcagtgatcctgtgatacaagtggagggggacgaaaaacgtccgtcgagcgggagggcggtgtgactcactccatgacgacgatggcagccatggtctcgacgatgggaacggcacggggcaagacgcaaggatcgtgacgacccttggcggcgaggacaccctcggatccgtcgtacttgacggtgctctgttcctgtgcgatcgtcgcggggggtttgaacccgatcctgtttgagcgggataaggattgggtcatcagcgcgtccgaagacctctcgacggggcgggatgaaagtcagaccgtggtcgacaggtgactcacctaaagtagacatcctcgccattggtaattccaccctgaatcccaccgctccagttggtcgaagtccccaaagtcccgtcctctcgctcgacaaacatgtcgttgtgcttgctcccgggcacttcggtccccctgaatccagagccgatctcgaaccccttggtcgaggggatggacaacatggcgtgtgcgaggctagcctcgagcttgtcaaagcacggttctccgagcccgtgagggactttacggatcacacaggtgatggtacctccgagggaatcgtcctgggatttggccttgcggatggcctcttccatcctcttgctcgtctcgatgtgggggcacctcgagagttgagcgtcaacgtcggcacgcgagaccttgttgatcaattcgacgtattccttgcccaacggaccttcctcctcgtccgcctcgagaaaggggatcttgaccttgcccacgctcgtgacaaaggcgacgatctcgacaccgtaagcttccttgaggtacttttcggcaatggcaccggcggctacacgcccgatcgtctccctcgccgaggaacgaccaccaccagacgaagccttgacgccgtacttggcgaggtaggtgtaatcggcgtgggaaggacgcgggtagagatccgtctcggcatagtcgtgaggacgttgatccttgttcatgacccggagtccgatgggtgtaccgagggtgaccccgtgttcggtaccggactggatctcgacggcgtcgtattcgtttcgctacgaaagtcgacgtcgaacgggagcgagaggatcagcccgatgtggtcgaacgaagaggcagcgcggcgtcgatggcgtatgggtccactcacggcagtggtcagatcgctctgcccaggtcgtcgtcgagacaactgggtctggatatcttcattggtcaatcggaggccctgtgattaggcggggtcgtaagtacgaaacgctgtcgatgtcgccaaaggttatccggggatgtggggtcgagcttacgggaggcacgccgtcgatgatggcaccgaccgaacggcaatgggattcgccataagtgtgaactcggtagatgtgaccaaaggtggacattttgcgtgggatgggtacgtgtgtgaggttgtcaaagaggatgattgtcgacgggtgtctgtaatgggctgtacttaactttttccgatgagatggggtcggtcgttcgaatgagatgatcgacgtcgttttgaatttcgagtcaaacccggcgcgcgatcgatatcgggtcaaactggggaagggaagggaaggatgataacgtcactaaataacgtcatacacatgccaactactgccatgtccgcgatctgtccaggcggacatcaacaaacaatttgatgtccgttgtcacactctcgctgtcgttatctgacaaggacccggggagggagggggggacattctcgggcgagcacgcaacttctagatcggttcggatcaagcacaccatcaaggttgagtagtgacagatacctacatacacacctatacaaacatccgattatcgtgaacaacaacgtatcgtcatcgtgcaacgacctcgaaacaaacaccacgacgaaagttacaccctcttgacggccaaatcaatcatgggtcctactgtgagtccgaccgcgccactatccgatcacatctccttgcaccgcaccgccgacgattgactcgacctacctcctttggacccccacgatccgatagaaacccgtctacactcgcactgcttcctccactggtctcgcctcggggatgacgaccccctcgatcgtccttccccccgagatggtcgagatgcacgccccgacccctgcggccgcctcgtccaccccgatcaccaccgctcccctggccgacctctcctcgctcgacctctctctacccctctcgaccttgttgaaatcgggtaccaagatcgcccatgccgatgcggaacactcgcccggcgccatcgcgctcgccacgggcacgctcgagttgagcgagtatgtcaggtacttggtctttctctgggtcgtctaccgtgtcctcgaagacgaattggacgggatcgtccgggagcgcggctcgtcatcagcctcggtggacggatcggtggatgctctgtacgcgctctggagcgacgaaaagggaaaaggacgaatgttgcgcaggtcggacgggttggcagaggatatcatctactacctcgactacctcggtattcacccggcggcggacgaggaacggatcgcgtccgcccccttcccgacgcccgacttgatcaaggatatcctcttatcccctcctacggacctcgaagcgttcacgaaacacctccagaccacctcgtcttcctctcacccgggacgtctcctcgcccacgcctacgttcggtacctaggcgatctctcgggaggtcaactcgtcgccgccaagatccggagggtctactccttgccgcctcctcctggtgggacgtcgttctacgagtttgacctggacgaagagggccacgggcacggagtgagcgtcaccaaagagggaggcaaggaaggtggggatacgctgtacgagcgaaagaaaaaggtcgaagggatcaagaattggttcagggattgcatggatatgaacgtgggcgacgacgagcagttgaaaggtgggtcgctcgatctcgatgtcgccgcgagatggtcgatgagccgtgttgctgatcgtgttcgtattcgacgtgggacgatgaccccgaatagccgaattggtgcaagaagccatcacgtcgttccgcctgtcgacccgtatcttttcactgctccagcctcccaaagcgtcatcagaggcatcgacccatggagctaccgactcgaccttgcaacagcgtcgacatgccggtgctgccgtacacgatctcaaggaaaaatcgtcgagcttcgtcgagccgaccttgaccaaggccgagctactcgcacgtcaacaagccctggacaacccggccttgcccgccaataccgagtggatgatgaaggtcggcctgttcgtctttgtcctcgtcgcatacaaaattatgagtcatctcatgctcgaagagggcgaggggttggaccgggccgggtcgaggttggccaagttgttggggtacgagtgaggctgagccaagagcaagcgcgggtcaccaggacggatacacgaacgtactcgcgtaatctggtctcactttccgggggggggggcgtgcctgtttcctaatttctcggtctctagtctttgccgtctgctcgtctcactttgtaactgcagaatatagaccgaacgataccccgttcttgcgttcacaccgcggagcgttgtccacaacaacgcctgtgtcctcggcttgacctccacctcgacaatggccctttacgcatgctaatcaaccaaattggggtggatcgtctttaaacgtttgtgcgggtgggaccttgagagagtgcctcgaagcgactgggcgaacaagaacgacaagaacgatagggtattgggtttgacacgcgaaaagagtcagcccgaggtgaccattcgtacgtcgcgagcgcactcgacggccggatcaagcccaaaacaaaggtcgcgggggatgcgtcgcgctcccgaagggagtatcggcctttgaggtagcggcgagtttgacgagggagcgggcaagcgaccgaatcctgttgggatccacctcgatcaccacctcggtccccacggtcgggcgatcgagaaggtcaccaggtgtacagacatgagacgcctacgaatccactgatccactaacatgaacggggtggttcccatagtcgacacgatcgctcgtcgatacagaactcttctacgcctcggatgggaaatgaactaaactctcgcgtacgggtccgccatctcttggcgaggcgagaagaggatgcatccgtttcgccctcggcagcgcgtcggcaccgagatcagaagaactattaggccgacaggtatcagctgcccatcgtctgtctacctttgatcctacagctactgctttgtccatcccgagctcgactgcgctgttgacgacgacgttccgtgtgtacagtcatccccgtatccaccgatgagacccattttttggttcccggaacaatgacgcgcgtgacagacagggaaatctagcgagatctgagaccctgttgatgggaaagccggggagtcgcctgtcccccgcaacgtcttccagggcgacacacacacagacactcaccaattagggacgacacacagacacggaaaccccctgtgtagaaccctgtcagcccatgtgcgcatcctcacggggtacggtccgaccgatcacgctgccgtctttgctgtttttaggtcggccgggcgattagacagcccggtgacgctaagcgatccgaagcgtgcgggcgagcacagtaatgaaaagtggtggaaacggaaagggctgggcacacggaggaccagagaggcaaggacccgggcgagctagggtgtcgaagcgtttgtctcagatccacgatacccacggacatccccaagcccagccagaaacaggaaacacaagctgatctgatgctgacggaacaacagaggacctggcttgttgcttgttgagtcgttcgctggtataatccgcgccataggccggatcgttaccacgtcgttgagctagaaggaatcagcgtctctagtgtgcgtttgtatgattctctgcggtggggcgagtaggcacaaatacgacgatctttccttcttcgccttgttttgcgcttggtacctctttgcctcgccctggccttccgacacggccgtcatatggacgatccacccttccactagcccgtcaactttgagcttactggccacgaggacgactgcgaatcaggacctgggacgaggccccccgcccagcgatttacactaaagcaggtcgatccacatcagcctacactcacccgcacacggacacacagcccttcggatatcgcattcgccgaggccgacccgattcgtccctatatactctctcgcttcgactggtccgttgcgtctggcccacgccgctactgtctataacatacaacaccaggcggaagttcgaaggtttcccttgccctcgagcgatctcatgaagggtcattgcgaggcataacctcacgagaagctagaacgatcgaacattcgaacacttgccctcgagatcgaaagctgcttcgggacgtttatctgccgatctcatcaaacatcgatcatcaatcgagactcatcaactcgtgatctcgtgatcatgaacgaggatccacctccgttgtcgccttcctctaccctatcgacacctcacagaagagacagacagagacgaccttcatcacctttgctcgtcgataaacctacaaactcgttggcggccgtgatggtcaccgagagcgattcacagcggggacgacgacgatcttctattcaacctcatttggccagcctctacatcaaatcgccttccctctcaaattcttccatccgaatgaccgattcgtccatgtcggaggattctggatcagaccgtggactgaagcggcgcaggaggtcgagtggcgtggagagatgtgatgagatgaggaggatgccttcgaagcgatgtaacggtggatccatctctcagccaggaggtggatatgatgacattatcgctgttgctgatggtgatcatcaacgaagcgatcaacagcatcgccaacatcaagaaccatcacatcacgccaaggacgccgtgtcccatgaattgcttaccccaccaggctccatactgtggtcatcgacctcatcgaactcgacagcatcagcgtcgacatcatccctcgtcaacgacctgcacgatacatccctctcgacttccaaatcggattcagcatcgtcttcggtgcagcatcaaccccaggcccggccccaggctcaaccccaacaacagcaacaacccgtgtttacatgtcccttcacgccatacgttaaggataggcaagatcagcagcttcgcatggctcacggctctgacagttcttcgcatgaacataatcgtggagatcgccgcaatagcagcatctcttcacaacacacccggcgtgattccggatggtccactaccgacagtagacggggcaccatcacgagcgggatctcttcgccctcgacctcgacgacggcagtcgacatggctaccaacaagcaagagtggaaacctttccccatcgataggctgccacgggacattgtcaacttgattctcgatcatgtactcggatcacccgagtttggtcagaatgggcggtggaaggataaacgagggcaggaagaggacaaggtccagatggtcagggcgttgaaggtgggtgcgagcgctgtcgacttgggacgagaccgagactgatgcgatcgttgggttgactactgcaggtctccgctgccattcacctgaagttcgccctcatacaccgctcctggaccccacacgtcatcaagtctctttaccgtttccctcggttgaccagcaaggaagccatcgaaaaattttcgcgagcgatcaagaacccgctgtctctgtggggttgtgagatcatggaggacggccagatcggaggcgccataggcgaccgcgggaggtttgtcagattgattacgtattgcgtgggtcgaggggtgagtgcggggtgagacgagtcgacgactttaggacagagactgataatcatgctttgttgatctcagagacactctgcgaccgactacctcatgtggtcgggaacttggtttgcgatcgcagcaggggcagtagtgagtctattcacagacttactgactctatacggcctgggcttgacgacatcttgctgctcacacagctcgccaacttgccgaatacgcggggatgggagtgtgagggctggtgttccaaggggtgcgaggagacgagagagctcgaggtgttgtgagcatgatcttatcttcctgtcacatggtccttgaagctgagcagaccccgcttcttctccagcaaccacccggaagaggatcgggtcgtgctccgacatcttagcatcctgcggagccctctcccagccgatgtgctcgtcttgaccttggcgcaaaccaagggcatgcgagctctggaactgctagaagttcagaaacatttcgtcatgggcgacaacctcgaccttcttaagcggggattaagaatggctaataacctcgagatctttgcgatgaaagtcgaaggcgacgtggaattagagggtccgatggacgatgcgctttcagtgagaccacacgccaggtgtttcggacgatcaactgtctctgactctcgtaaatcccttcaacttgcaggttatgcccactctcaggcatctctccgtgcaggcagacctgctatcaatgaaattctttgcgacagcaaggacttcgaaccttcagtctattctgatcgggctggccacccgtccacctatactgttccacgggaaaaaagccctcgacacactctgggctgaggctcaaacggaggccatctactctcgagttcgccagcaggcgcaaaacgtctttgcagaaggtacgacctttcaaggttccgtcacccatcgcatgactctaaattcgacgactgtttcgatcaatggcgaatcaccagctggcatcaggtcttcaccagcctcatcgatgatgttccatcagccgcttctgtcgagctcgtcttccgcaccgtctgagcctcctctcgggtctcctagtatgggcaactcgccttcgtcatcgcagcccaacgttggcctcgagtcctggctagtgagggaattgaacaactcgcacagcgctctttcaagagtctccctggccggagacgatgcactggccgtatatacctcttatacacatcaaactcccatctagtcgcgcgttgaattacaatgtattggtactacatatacccctttcgcctttcgttcggcactgtttgtatcttgctacggttgtaaaagtaggatccataccaaggaacaaatgacacgctccttttgcacagcatcggaagcaatctatcgggagcatatcggttcaagtagatcgcccatgtccgaacatctatcaacatgaatggctctgaactttcacggacgtaccgtacttggacatcaccctttttataattgtacgattaccgagccttattgacaactcaaatgacagggaaaaagcaagacgaagctcatttgaacagcttgctggcgaccgacgatgttcatgaggtggcgaccggatcctctgcgaactggcaacagcttccttcctacgaagaggcggcttcgcagctcgaaccgcctgatatcgacattgcaggagtgcgaagacccccaaaggagcagtggcatttgttcgggtaccctgatcatgcggaacccaagctgactagttcggcagaagaacacgacttcgaacacttgaagcatcgcatcacctcggaaggaaatatcgttacctatgccaaggatttacatgatcgtacgcatccgatcgttcgccctatatgtgggagcttcagtattgatctgctcgtctcttgatagctaccactcttgaggcatatctacggcatcaagctttcagcaaacccccgactttgaaactcaggtgcaaaggcaagtctccaagagcctcttcacgactaggttgtttctgatcagtgctgcgatggccaggtgaacacacggaaaaccgatatgtccaggtttccgatggcaaaggaggttggaagaccgacattcagacggatacgattgtcgatttcaattttacagtcagtatgctactcatgtttccatttacccgatgctgactcccgcttcaaaagatcgacctcacccccaatctcaagcaagtcccatctgaggctgttgtactatccacagtgatgccacacgaaccagcatatcgaggtagtagtggcaagacctatgatccccactattcagatggagaacgcaggatcagactcgacatcaaggcaaaggcaacggatcgtggtcgagagagcacctggagcgaaaggaaatcgtggacaaagtggaaggccaggcgcattgccaaaggctatcctacctggacatcaatggaagacgatgctgccgaatcgccctttgcgctgccaacgaacacagcacgcgttcatgacattgaggaggccgatggggaaggcagtagcagcgatcaagctagtttgcacgagtggtgccaagcctactgtcggtccctccaaccgatgagagagtttgtgttgaaaaaggaagtctggggctgggatgaggagggcgtcttacttggtaggttaccaccaactttcacaatcatgagtacaagcgaagttgatatcttttccatcattcacctagctgttcgcgctgccatacaatcgaccggctaccgccacagtttcgcagtcacgttcgaaaagcaggcgcggaaagtcctgattcatcccgacaatctgttttccagcttgactaccgaagtcagtcatccagctttgctctgtctcgtccgagccaactaacaccctctctcttagcctatcatcgtattcctcttatggatcactcttatatatccgttcctctggctttagtgagtagacctagtaattcgttgcgcacaacgactcccgctcaatgacctgccttgacagcaaacgaacagtggcaggtggtcgttacgaggtggtcactgcgagctgtatgtaccgggcagattttacgatgaatcacaagcaagcatgttctgacaatcttattattgcagatcccctcaagtgctatctgccagcagctcaagctacttcggctttcccagacaacagggacatccgacacggtccgccggagactggaccagcattgttccgcatgtatggatctcgcgagggcgatttcgttcgtgaatgggaaggccgaattcgttccagcgtagacagacggttcgtcggcgatctcggctcgtcgcacagtatttcggagctcgacgaacgcgccatgaacgtcgcacggcgtctggacggttattgattgctcggtcaacttgaacgtaaatgttgtatatatgatattcgatatacccaactctttcgtaagccaaatattatctatcgtgaatgattcttttgtaaaatatacgataatgggattttgagcgacgggaaacgctttcgactagactgtttgccagactttcgtggaagacccgatttgcaaattgtgcgtgcgggaattttcataccagtcctcccaagtagcaaagtaaggcggttcatcgttggctatgttggtgcttttcctttgcgctcggaattgctgtgcttcgctcaatacattaggaggcttgaatgcaacgtgatcgattatgacttcgtattcttgttgcaggcggtcgacgaattcttccggctgcgaagtgctcatatggtcagaccagaagtcgatatctggcgatgactttgacgaaattgctcacctcattttctggccagtcgaagcacagcatcatcaagtatatgattgcacgttgaaatggtcggagttgctggacgtatacggcttgtccgaatggcgagattgcggtcatggctctagaaggcatgtttgatcaggtccaaaaggcgtcccagaacatattggccgccacctactcgtaataccggtatgctctccacgtcccctctccgtgttcaaactctcgctcctgccatggtttatccagctcggtctgatctagatcctgcgcttcgaacatgacgtcttgaaattgctcgcatgtcataccggcgagcgtgagcgcgcgacagacttgaggctgaaacagcgccagctcggttgtgacttctagtttgcgggagaccattccgatgacacgcgggaatatactatactgtgtactcgatatcggcagagccgaggaaggtcttcgtggggcttcgtcagggaccaatgggtcctcctggaccgtaatctcttcatctgcgtcgatcgcacgagctttgcccttgtcgatccatcgtttgggagtagctgggggtgtcagcggaatctatacagaatcgattcaaatatcggcgaaatagtatgacgggtcagaccgtcgaattgtttccttacgtttctgccggaaggctcctcgcttgtatcactgccatcgctgtcgagagaatccaaggtgtcctgagtgaccaggtctcgtccctgcgtaagctcttgttcgagctctttttccaatgcctgaatcggctggccacgtaaaggatcggcatgaaccaaacaatatccgagagggacggcgcataggaccgtgggccggccttgtagaccctgcagagtcaactcttccctctgatcactcagagggatatctatcagcttgagcgcttatcgactcgtcggatatacgtgcctctcctagatctctcccagtcgccacctgcaccatggccaagatcagagcttggagcgtgtcagcttctgcccgtttcctcttgaaagtcttcttgtaccatctgcgcccgtcgctatcagcagaaagtctatcttcatacgacttcagacggcactcacgagtataggtcgtgcaaggtataatgttcctggtgcagcgggccttgggtggcttcgatcatgatgctcacaaccgcatggttgaagtcgacctgggcgacagcgatcatcttgccaagcgcgggatgatggatgacgcgctccggccggggctcgccgagggcgttggcgaggaggtggacgacgtgacgataatcgatcgttttgcgagaaggggccgtaggaggaagctcgataaccaccggtggaaggtgagtcttgtcggttatggaaaggctttccaagagcttcaagggtacgtctttctgttccgcgactggctgtgtcggtgtagacaggatgccaagctgagcgcttgtcgccgtttcatcacgagctcgcgcttaccgtgtcatcgtctccatttgtcgtgaacgacttccgtgaatcttggggctctctacattcgatcggtggaccgaaagaaagtcccaacccagatttcctactttcatcgtccactttctctcggtgactctctgcgtctgcctccaacttcaaggcattttcattggcgataccggcgaggacttcccgtggatcttcgtacccttgattgtcatgttgatcctctgactgttcattctcactgcttgagacccccgacacttcccaactctttctcgccgactctgaatcaaaaaccggtcctatcccccatccaccttcctgaccttgcgcattcttcctgtcgttcctcttcctcgcgtcgtcgttcaactttcctcttctgacaacctgtctctccgggataccggaaccgtgaccgaccgccacccaggtagcagccaaggaggaggtcgtgctcgtgtacgtccgtttgagggtttcgagaaaggtggaaatcgaggacgatcggcgagcgcgcgtgggaggtttcctcggggcgtcggggacgatcgtagctgtagtgggagctgcagttggggtgatgtccgtcttgtagggttgagctggtcgaggagtgagtagatcgtgatcggtcttgggattgattccatccggatcgataccggacgtggaaagggtcggctcgaaacaggtcatcgttgccgggctttctgggctccgaaggaggtcggtctccccctcggtgtgctggtggttcttatgttgaccagtctcgattatttcggaaaccttgcgtttgggtgccggtgtctcgggtaagaaaccgtcaaagtcctgtacctcgagatcctttcgcgagtccattcgtgaggcgagtttttggaggtcgagagcgttgggctgcttggttctcgcagtgactggacaaggcgtctgtatgacgctttccgcccctcgtctcggaatagtctcgtagtcctcattctccttgtcggtatcatcctgcgctcgtccgatggctgctgtaaccaactcgtccagcttgatcttcaccaaacccccaccctcaaccctcaggcccccactgacccgtctctctccctttctttctaccatggccatctcttgtgctctcgataatctcctcccggaagggccataccgagatccctgctcttgaaggatctgataagaaggggaagacggggtgaggtaggtaggtggtggagaatccggatcgatgtaggtattttcgtccgagcgtctttcgacctcgttgtccggcacgttcatcagggacaacaaaggtcctttcgcttgtttcagatggtgtgatggggttttcaggtggaagaagagtcgtctcgggactgcttataagagcaataatttggattggaaggtgtctcgaatcgagattatcgatcgtagaaatacgcgaaggagtgctaccattgacgagtcagtgtttgtgctcgcaaagtgtagatttcatcattggttcatcagaaattgacacggaatttcgaggaacaatcacggttgatcactaggctttttcatcattttgatggcgcccccgttgtcaaacggcctggatctcggcgggtcagccacgatcggcaggggtttttaccatcaacaggtatctaggtcttgcagctgacgcctgcctttatgaccgttgtttgtggtgatgggaacaccgtgaccgtgacgaactatgacgacgtcctgcttcccctactgcctcgtttgcgtgccatcagaatgtatccatcgcctccccccgtgctcgatctgaaacccccctcctttggccgttctctcgtcaacgctgcccgctgcgcgtcgcccagctgacgattccccccctatcgccccccctcggggtttgcttccgcggtggttgccggatcaagccgacgagtttagcagttgatatggctcatccgttcagccaagaccgagccacttactctgtggatgaccctttcagagatgattctactagcaatcatcccgccaccatcagactaattaggtcatccacaggtcgattcgataatacgacctactagctagcagcttgccgcattgtctggacgagcggatagacgagtcggcaaacaacgacctcgtccaggtcaaaggatcctccttccagcttgtcgtccacctcgccccagttccttctcggcacagcccgacacgagggagaaaggtctgatccacgatatcatcttgtcaacctctcgatcagcgctggcattccttgaccgtgtcttcggaacgctctggaggagatagggagacgcagctggatagatacgaaagttgagggggttttagagattccccacgattgcagttgatcaggaggaattcaaaacaaatctacccggcccgtaccgtatcgaacaacagtcctgtcgccacctccattacccttcctatcactctaccatcgtccataccgccatcaccagtacatccccaatcttctcggcaacaaacgcacgctccaatcggctacatcaagaatcctgctcgacccttgaaacctggccaacagccgggttaggccctataatcacctctacgagtcatcgatttcactcagctaacggccgagaactacgggacagaccaacctacttggtcaacgaccgggaccgccgctaaccgacccgacttgggctcgatccgacccgatccgatctcccatcaaagcctcgaaaggggcagaacgacgacttgcgaccctctccttttcattcatcaccatgggaaggacgtaccggacctacctgcacggacgcagggtgtacggatgtaacaagtgcaagaaccatttgaccctcgtcgaatgccttatcagcaaggtcagtcccgtggtcggtcttccttcgcagcatcgtatcccgaccggggcttctgatccggggtggcccgagtccgaccctccggtggacgatggtggtgttcgaagggtaagagcgctgatcgatgttgccgtgtacgcttgtcccgtgcgccgaaacagaatttcaacgggcagtacggcaaggcctttcttttcgacctcgtgtgagcatcccgtgcatccattcgttttccccctctagcacgcccggattttacgtcagactgacgacgggggtaagaggggtgggatggacgagttcatcctggtcgtcccgagtgtaggccggtttctccctttgcgtgttgatgtcggggctgccctagtttatcatcaggatgtcgtcgtcagtagtagtgtagtggtggtggtggcaggttgtagtggtggttgtcggtatccttcaaattctgttgtctctctatcttttgtggatgacgaaacctcgagctcgggctaagaatcagaggatcagaggggaaatcgaccgatgatttgggtgaaatggatgatatcgacagtcaaattgttactatggacagcgactgctgtgtagctgcacatactcaggtgataccatgaccgagctacaatgagatgatgatcaggcgagttgcatgttggtgttcctgtcgataaccaagtcaactgctgtatctacctcgtcgaacaaagtgaaacacgcaacaagcaacaagagacgaatcgatggaattcaaacaaccatggagatgtatatatcatcgatatcatgctactgctgtcactgtgtgatccattcgagattctctaatcatcacatgacatgacatggagagtaaaaataaaagtgtggtcatcatcatcaccatgtctcttgatctgctcgtgaacgatccggacaaaagcgggaattcttcacccaaatgatatcgacgaggtcctttcatatcccaatcgagacgagaagacctggtcataaagggggggatccatacgctactacttacccttggttcttctcatctcgatcaaactctcgatatccctcgaacccggccttgatcacacgaacaacgacacaaggaatctatctggtcgaccaagttcagctcaaacgagtgatcatgtcccgaagtaccgcacaggagtttgacaagtacggttaccctatcccaatagcccccatccgtactcaccgagcatctaggtcagtctctacaccgactctcgaccatggtaaagcacaccagctcgatcatgatcgcggctcaggtcgccagagcgatagccatcgatccaggagagaggagatcgtcccgcatcaccggtcgaggtacacttaccaggatctccctccatatggatatgaacaaggccataaaacggcctccgagtcgctcggcttcgatccttcttctgacacccagaaatcccatgccggacctcgaacgagcacacaccgcgaggttgacatcgttcgtgaggccgacgggtcgcaccggcccagaccaccatccgtcatccgggagagcaaaaaggaaagaaccccgggttcgagacagaccagcgtgacctttgctcccccatccttccggccccacgccggaccttctactgacgttctccatggggtcgaaagacccgacaggaggaaggggggaaagatggaaagcgcaaggtcggcaaggatgggcatgggacaggcagatcggctaccccgagcagacgtcgaagagactgttttgaacccccgggttcggacgaggtaccctcctgtattcgagcctcttcctcggtctcaacttcaatatcatccgggcggatcgcctaggacgagccgatatccccttagcctagatccgcactcaggggaagcttggaaggggactacctcgtcaggccttgcgccttcgaattacataggaggaacctaccagactcgtttggaccgaggtgccaatgtccgagatgagagagtgaggaaggatgtttcgagaggggacgagacgggtgcttacgcccggtcatctcgggcgccccagatagccaggggggatacgccattatcgccgtcgtcgggaggagaataccgaccgctgtcgtcatcaagacgattaggagatgttcaaactcacaggacctggcatctcgtccttccaaacgaaagccctagccgccaatcgaactgcaaggtggacggagatgggcagtcgattggatacgagatggacgcgccacttcagcacaagcgcgagggaaatgtacacggacacgtacaggtggatcgaggacgagagactctccatcgaacggattcggacacaagtaaccgggtcccaatgaaacgcgacgagtcagagccgggttacggggcaaaagcagaacgtccgcctccgattccgcgtaaacctggtcgtcgcctggtcgaccccgcgtacgctgcaccccagtcgccaaccccgcctttaccaaccgcggaagagacgccccatcagccgacggtagcatcttgccgcgatcctgtcgctgaaagtgctgtccccgccaacgccccgcatgaagcgcctccagtacggacagcgagtgcgccggccgtagttcaagcgaccggatcgagcggggctgccgtcgacaggagcaagctggatgacatggaggacgagatcacctgcccgatgtgagtcctattggatttgttccccatcgtatcgagatcccgattcaacaccgaatcccggccgtcgctcgtagatgcatgtcaatcatggtagccgtacacgctgttgcgccttgcgggcataccatgtgtggtaagtccgatgcacctgttgtcagtgagcgggcgcgaaagacgccgagactgagatcactcgatattgacaggcgcatgtggacacgaatggtttcgagatcacgtacgtccgcacgtcgaccgccccgaccgcttattttgagatcaggcccttatctcctgcactcacgcgcgcgtgttgtgtgattaggacacctgcccgatttgtcgcacgtcgacctcggcaccgcctatggttcccctattacccatggaccgcatgatagagctgtatgtccgagctcagggggaagactgggacggactccaaggctggcaagatcgacgagggtgagttaggtgccttgccgacttgctggcacaggatatgcccgcttatgctcgtccttgtcccatttgtcctcacaaccggatcgcttctggtctgacttgccgactcttcaaacttcttgcagagcttgggaagcgctcaaggtcgtcatcaaggaggaagaggagcagcaacgagccggtagcactgctgcggcattggcatcaccgactggcgctgcgctagcgggattaggcgggtggctggatggcgaggaagaatatcgtctgcgggaagacgagtgagtctcgttgagcgccctcgatatcgactcaggaagattgacgagcgaccttgtttcttcatgccaaatctagaccgtatgataacccattatttgcccattttttcgaggagactcacagtccctatgcgggtagtgccggacagccagcactggtcggatgggcgagaaatttctcggtcggggattttgagagaccgaggttccctgagccgggagtcaatccgtttatggacgcgttcggttgtgggtcgcttggtttgccttgggtatcgatcggtctttggcatacaacggagttgactgatcgaatacctgcgcttggcatcgccctcagacacatctcgtcccgcctatgcagcacgcgctcaacgcacgttctcgttgcccggcatctcgagccccaccatgaactcggggcgaaggtccttgttgaatggtccaagaggatggatatcggacatgatggacctggtcgatacgttcacgcgacacgatcatccgcgacctccgtaccgcgacgtgtcggggcgatcgggcgcgcctcgaagtgaagacgatttggatggactggaagagggtatggcgaggatgtttgccgagttgagacgtggcaggtgaggtggggggatatcccttggaattgtacgtggaattgtacaagatgagacgtggagtaccccaccgacggcttctttcggaatcaaatttcccttgtttcggtcggttccgggtcatcggatgcttttcttagtggatccgatatggctcaaaggggacagacgacatcgacttgatgaacagttgtaccctatctatgccaggggtccatcttgcaacagcatccttcacagcctagagctagacatcccagagagggacgcgcatactagccagctgtgtagcctgctaaaagctcgctcggacctcctcggaccgaccgacagcccatcatggccagcttcaacaaagaaggctctctccaactcgacccggcttccttcctccccacgactcgccggaccgcctcgagcctgtccaacatcctccgactcggtctgaatcgcctgcggagaaatagatggaacatcctcgccctcccctttgtctgtctcgtgttcctatggctcgtacccctgagtccacctttgcctccgagctacgccgaggaatgggcagaagagaggtggttgccgcagatggcctatgagggcaacatggaggggaaagaggaaggaagatttgtcaagtaggtcctcaggcagtcttgagaggtcctccgggaagggagtgacaggcgactgatgagatgaacctttgctgcccattgtagctttgcaccgatcaaggaggaaggttcgtcgatacgcccatccccattaaccaacatgtgactgatatcctcgtcctcttgtttgcccacaggtttcaactatcagttgcagagtctcatgtacgtctgagcgccgaccgcgatcgcttctcgtcgtcgaatcatcctgaactttcccactccggacgctttcccttgctctcttcgatcagactacaacagcatacggcatttctggcgaatcgatccttggcataccatccttatcacgtgcatgattcggtcagtccctctggcatcattctcgaatgtatacagttgcgaacacgacgtcctgatgcgccgacccacctgccgcacgacaggtgttcccgatctcgcccacacattggcccttgaaatcgacccggatcccaatgacggcgttgatttactctgtatcgagcggtttcgagggcatgttcggtcggagacgcggtgtcccgtgagtatgacccgcggcttgaccgtcgtcgacacgggtctcgggctgacaaggctgtgacggctcggacgaccaggcttaaacactttcagagcgtctgcggggtgcatgagatccaacacgtaaatctgcacgtggatatggcgcatgcgggggacgaggaacaggcggtggagatgatgaagaacatggcgagaaagttggaagatgagagtctagggcggtgtgtcgaggtgtcggtaaacccgttcgatagggggtgagtccgggatgggcgtcgcgacgggcaatattagtggaagcgggctgacctagggacgcctctcacagattcttcgaatcgcactttccagaagccttgttcccctccttgtcgacttcgccggtcgtcaaacagttttcattctccacccgggtctatcgaataatcaaccggtcactcgacctcttgtccccaggggctaaaccttatgacgaggagatcgagatggtcaagaaaccgagacgggcgtcaccttggaaaaacttgctggcgctgcatttgcgaaagagcacagactcggagtattgctcgagtctcgggaaacgggcggcgtgagtggcctagcagcgtgacacccccgcgtagagactaaagacaggccgcaatccctgacatgatagtccctttgtgggtttcaacaagctgccgaaattgcctggcaacgaaaacgtaccgaccccgatcgacatggtcgcggccgcacgtcaggggctgtacctcgcgaaatgtgacccacccattctggatatcatcgcccgggcccgtcgattacggacgaatcatccgatgctgagctcgatctacatcctctcgaacggggattatgggttcgtagccgaggccagaaagtggctagagtcggacggatgggatcgggttctcaccagcgccgacgtggcgtacaagtgggaggaccgagagattgtagaggctgtcgataccgagattgcgagacggtcgggcgtatttgtgggcaacggggtgagtgcgagtctgccatggcgtaggtcgaggcgtggctgacgagcgagcgtcggttacagttctcggcattgagcagcaacgtcgcccttttgagaaacgccgatggcaagcataccgactttacgcaatactggtagcgccgctggtggcactttccggacggacgtgctttggggctctgaaaggggtcgaggacgaggacaacttgtattatagatcgcatgctgggcgccgacctggaacggcgtggcactcgacgaggtgtatacggggaatcaagccggtcatcgaggggtatttattggctgacccgtgtctagccgccgggtagctgctatacaatatgggagtatttaaagagttctcaacccgccttggccaggtgtcggggtctcgccgattattctcaccctgctccgcaccctgctagatttggcacatgtggattgccgtccttctgtcctcagaataagccgcgatgttggatcagcgcgaggatggcaccggacctaggacagggctggatatagtgacggtgtgtaggagtgtggtccgcagggaagggggggaggcggctcgcgttgtttggccgcacccgcgtgtcgtgttttgcagttatcaaggtcatacgtatccgtgtccgcgcgataccttgcttaccgagacctccttgtaactccttctctgccagccgcttgtccactcggtcggcttgatcatgcgctgtgtttgccaagccgataagaggggggcaagagggggttgtgtgatcgagcgagtcaaataagcgccttctttggatcagaaaccgactttcggttgaaacgcaagcaagtggcggcggttcaggtgtaaactcccgtcgtcgaattataaagtaatgagtaccaggtgacaatgcagcgcatgtcggatggaccgaggtctcgccaacgcctcatacatgcgagggtcactgcggctcgcgagaaacaaaacgcgcgcaccgggcaaaaagtaatctcaccaatgcgagtcgaacgcatgacctagggatagactcttaaatccattacagtccctcgctctaccaactgagctatggtgagccatatggaaagagcgacttcaattatacctatcagtttgaacagggaaaaaaaaaacccccggtcggaaaagaaccacctccaacatcgccaacaattcgaccgaccgaccctactttgcggacggacagcctaccagcagctctgttcatggtcaagctgtagtgtccagaatcatcagggtttcgcccgatctgtacgagctcgatttgtgcttgcgaaagacctgcaattctcgaatcagtcctacgtgcaagaggttgatgcattttctacgcgaggtgcattcgcttccaacatcatcattctcgcctggcgtggcttgcgccttgccacttgatgtctcgaatcactttaaatgatcgtcggtcgcaggctcatcagagacgagaaacctggattactgatcgatcacgggtagcagagtgatgtcaaagggcgacggtttcttcccttcttcttcaatcgttccaaggttgaccgattcgtatgatctcaatgatgtccttgcacctacctcaccgacttcaatatcacatcatgccttcgacgacgcccacttactgggatgaattgaccaccacgaccaccagagtcaccccaaagcgcaaggcagacgagaaggaggatatgaacggtcagaagcgagctcgactcaagcaaacgcaattggtcctcgcccctacaaagtcgtccgcttcggttctggatcctacaaagtcggtcacttcgatcgcttctacgaagtcggtcgcttcggtcctgggtcctacaaagtcggtcacttcgatcgcccctgcaaagggcacgtcatcaaacccgattgacctagtaagccatcatcatcaaattccgtagcttcaattctgattaggacatacgcggcgccattttgacaggacgagacagatcgaacccgagagaaggacgaagtttaatgcacgggctaggtttatggctaggtaagagagagagagatcctcgaccatcgtccgacctgacatccagattgacacgctccttatcgcaggcgatggttacacgtgcgacgagcagacaaaagcagagatacagcgaaaggatctggcagcttcgctcctgagccctcttatagacccttgatgtagctctgaaacaacatatccagcttgttgacaaccttttcctttggctgacctgactctttgaaagcctgcaactgctcccaaaggctaacctggaagtcttccgaagcgtcagctcacaagacgtcgctctttggaagcctgcaactgctcaaaggctaacctgaaactcttcccaagcgtcggcagcaggaccaacgtcttgtgagcgggcgattgaaacgatttttccgtcgatccgacgcagtcggtatccctctggtgtctcttccaggatatgttcgatttctcctctcacatgggagaagaacagcgcgaacgggacgactatcttgaagaactaatatggaacattagtcttggagatcagctcgtgctagcctgtatgagtacttacctgtacgggactcgccgcagctgagatcgataagccccccatcaattccccatcgacggtgcaaaaatgcagccttgtgttgagacgaacgaggcccactgcaccacatgttgagcagcagcaatggaagagacagtgggtagggtcctttccagacgttcttttgatgtcgtctcttgtagggacagaagagacccagtccagcgcctctctgaccgaagggttgttcccgctgtgataggatgatgtcgagtgagaagacgaaaagagatggcgatatcaccgagacgtacctgtatccaggccatggtcctcctgtcgctgcatctagacgtctctttcgatcccgagcaaccatgtcgatagactccctagccttgttgatagcggctgtggtcagttcggtctttgattcccggctatggaagatgtttattagcgattcgaagccttttatcgaatcgccaacgaccttacctgtatatcgatatgcgaaagtgtttaccttttggcacatcggacatttgacccaccgttccaggttggtatccagcctctctcaaagcgtccacctgagtcattctatctacaagatcgacaagtagacgggtcagccactttactagcgtcaaatctgagtcataaccaccaacttacccgcgctgtgcggcgctccaatggccacggtatcagaatcgacaaagttctttctgatgacttgagaaatggcggactgcctgttgaaagagtcgactgtcatcggccggcgaaggctccgaatggacgtttgaatagatgtgattgacaggatttgtcgtttcagtccgtcgagatagtccgtcagaatatgctgttcgaacacagcatacttgaacaatcacggcccaagtccgtgtcgctgcgagacgtacctgatcaagcacctcggcgactaccgactgcgctgccctctctccccaagtcatcgaggtcctactggcggccgccttggcaagacgcgctaccgccgaggaacagatgaacagagagaacagaaggggttggatcgaagggttgtaggcgaaacagccagggtgtggctgtactcgagcgtatcaggccgtcgggtgtatgagttatcgacagacgagtagaggtcacaggtagaagtccacggttcggggaaggaccaaagagattttcagtgattccgcttagcccgcacatcgtccgcgtctcgactcacctgcatcaccgcgacacaatagtgatccccgaccttttccacccggatcgagccagcctctttaactgctccaacttcatcgtcaatattccatccgcctgctggccctcttgcttcctctacttcctcgatatatgttccgcgcagtctgccctcctccagcgctcggcggacttcgttgctcatgaggcaaatgactctcggacggatgagttcgccgatgagtcgacttaggagagcgcaggcttgcctgaagtccaagggtcgatgagagcagatgcagaacatgtcgttagcaacgttttgcggcttcgatctcaaatgaaactcacccgtagagttcggtgcccggatttggaggaggaggaacagcatacaagtcgacgaaacctccgtatttcgccagggatacctgatcatacgtccactgtgacattggaacatccctcaccgcgtcgaacgtcaacctccacagaatacaggctggtccagcattgttccaccagtcactatctccctggttatcacgtctggtgattctactaccaacaagcaacattgcagtagtgccatcctgataaccaaaactagctgtctggttgacagttcgattgagaactgctggggccatagcatagttgtcctggaagtgcttgcggacaccttgactaggtgggataaagcttgtatgcaggagttcggtggatagcaggtcggataaaggagacaggatttgggtgacctcagagggaaccgcgtatctcgtttgaggtacacctcccggggccgagttccacccccgtctgtctgcagctagcactagtcccgcctcgagttcctgtagatctggtctactacgccagatatctccagatgccggggaatccgttgccagaggagtatacagagatcgaaactggtataccttccagacaagggacgaagaggagggggttgaagaggaagcggctgaagtggaggcggccgatgagaggatatccgtggacgtggttgcagcgaaggtgaatcgtatccatctcagcaacgtcgagtcttgaggaccagtaagcgcttgatcaagatcactttcaagtcgtgcaattggccccgcttcagacatagtctggccgatgtaatgtccccagattttcgtgttgtcattatcctctgcatcacgagatggatcgaggctttgtaacttggctgtgaccgctgccgtgaactgaggataaaagtccataaaggacaacagcctctctcgttcctccttgaccgtcgtctcataggtccgtatgtaaacccggaaggcacgttcggactcgactgtgcacggctcaagggctggatgcacgggagaggtggtgtagggatcgagggtgaatcggaacagccagtcccgggtatcctggtcgagccgggcgaagaaggaaggggggagggggacaaaccctcggatccgagagatggtctcgagctgcttctccatggtgtcaagacctgagaggtcgattggcttgatgtcgagcagtttgttgagggccaaaccttgatccttcgccctctgatgcctgtcccggtctgcagtcccgtcttcgacttccgccttcttcttctcgtagaaagccctcgatttagctagatcacgattcatattgttgtgcggattcgattgtttagtgtctagatggtgtagtctgtgcgtatgctgcaaaattacttgcttgcgttgcttctttgtgttgtgtcaaagattcaggtcgtcgtcttcgacagatattctcagcttcttagggatagagtataccatggacatgacgaaacgacaaatgtccgactgatggcgactgatgaaaaccaaaggacccacgggagtagcggagcagagtagtatcgaaaggaccttcctttgggtgatcagctgaatcaacttgcaacttgcgttgtaggacgagccaggtgattcagacaagaagctcgcgactttcaagccatcgttcgtcactttcgacgcggcggggccagcgagcacggacgaaacgactaagcgcgagtaattggcctattgatacgtcatcgtagacaaacggcgtccatgaaatgactgaccacactctgactaaccctgaactccaactgctaatggacgatatgaaaccaagtaacacgtccatgggtactgaacaccccaaaaaactcgaccctacaaatactactacgacgcaggttgaaatcaactcgtacgcgttaggaatcgtgtgtagcgtatttccgagacaaagggtagcaaagggcagagagtcttggtccaagatcgaacacggcggctctcccgtatctaatctccagatcccatctgacagcgttgccactactatttccttcaagatgtcattctggcgtggtcgttgattgtcgatccagacgaggcggccccagccgttgacgaccagacgacgcgcgtcagcccggtcacaccgatggaccatccaacaaactctttgcacactactactactagtactactactactagtactactactactactactgtgcgtctctgcaccggaactcctggagagtccgccttcatccagcccgaacgtcttccaatgtccacgccgccgctattgaccgtccctcagatccggtccgacctcgacctcttggcccgaaatcgaacgctgctggacccgttcctaccctcgtcgtcgtcgtcgtcgtcgtcgtcgtcgtcctcacaaccggctcccgacccaacctcgacgacgacgacgtctcaccggatagacccgtctgtccccccggccaacgctacggaatctatcgtttacgccggagggtttatggactctactagacgtggcgtcctcgagctcgctgacgggacccaggtcggcgagatgggtggacgactcgagcgtgtcaaggtggagttggatgggttgtcggctggcttgcaagggcattagggtcgtagtagccgatcagagagagatggagggcatggcttgagatgtgcaaggggtcgaagggtgtcacgacggaccggaacagagggacctatcggcgaccgcgatgtgtcggtggtaacacggtcggatctcgaagagttcgaacgcaacgcaatcctgatcgatggacagtgtatttgtacgagcatctcgccacctacgacatatcgccgagcaccactcgtcgagactagccagtcttggcagttgtttggtatacatacagatcggcgctgccagttgatcatcgcggacgggtgtcgccgatcgactgagactgcaaccagccgtggttgacatgatcagagatgcaccctactcgcagtggccatagcctacctgtccgaggatcacgagattgacgatatatctgcgcgcgcgcgttgactgtgcaagtaatcccgcaaggtcgaggtcgatcgatcatcccccaagattccggatatgatgcaccaaggtttgagcgtcgacgacgagacttggacgatcagtctcagatgtcaagctgtgaacaccgacgatggcagagctggattgcataatcgttggtaacgtgatcaattttacgatccgtgacctgcagacgaaacctgtgcacgattttgggaaccgagttgttgcgtctctgtccgtgtctcggcggttttctcccagtgtttggctgctgagccgggcttttcgattgggttcctcctcgtcttgctctctcatatccatccattacggccacccaacaccacaaggacccgtccgttcatgcacccggcggtcaagtatatagatgctgacgtcgcgcccatacatgaccacttcgtgactcttcgatcgtctcgttgcacctcacaaagatcccatccatctccacaacgtccagacccgcgagtctttggcccggcgagaacggcgcatcatcatcttcgacgacgacatccccgactgcgcatcgacaaggtcacgacgacgacgacatcctctgccttcccgatcgagtcggctcgacaaccctccatcctcgagacattctcataatcgacgattatagtagcacccccgagtgatcggcaaggcacaactcctccccggtatcaacaacccctattcgccgagaatcgctccactttcgatttctcgcgataaaacgtcgacgacgtgcatcggtcccgagaagcagagacgagtggatcagagggacagggtagaagtctcgaggagcgtgtctaaagagggtttagaccacgggaatagtcgacgagtgcagccacttgtaggcgaggaacacactcaaccttcaacgaggcccatattaccttcccacacaacaggccggtcgatcaataacgccccgccactactggacgacatcggtacaaagctctacctggttgaccacaacggacctagagtaacggcatcgtgacgctccggtcgagcacgacattcgacaatccacctgcgttccactcgacgacgacatgtccacctctccccgtctcactccggccgtccgccttcccacaccacccacagccagccgacctcatccagtcgacgctcccgaagcatcaacggcagaaacgcccgcacggctgtcagcgaacgctcccacatccgtgccggctccgagcagacctacctgggcgacgattgacgacgacgagctggacggggatctcgacatggacgtcgaggagaagcggatgactatcggacaagcggaagggattcgtgggatgagcgacgagatgacggacgctgttggtggattgatgcagatggctggaggtgcagtcggcgccggcacagggtcgacgacgggcgagacagagaacggacaagatccgacaaaggacgacgaagaggaggacgagctggtcgtcgacgtcgaagaggagttttcgacggcggtgccctccacaggtcgaggtcggggtcgacgtggaggtgcgacgtcggcgggcggttcgggaccgggcaggaaaaagaccgagggcaccgcacccaaaaaggctccaagaaagtctgccacgaaaccgttcatcacgaccgccgcctcggcaacgccctcgacgccgaccatttcgacacccaaaggtaaagacgagcctggcgcacccgtccctctcgagctcatggagattgacgagattgccgacgaggacgccatgtccacgatcaccgcttcgaccgccctggacgtccccggcgcatcatcatcgacgacggcgactggcaagaaacgacgcggaggtaaaggcggacccgggacagggagggggaggaaaaaggtcgagctcgatcccgcaaacgacgatcccgaaggttcgatgcccggaacaccggcgtcgacgagcaaggccagcgcgaggagaaaaaaggtcgtcgctccgccttccaactccggggacgtcaacggtcagggtcccggaggtgtcaccaagaatcagccgcaataccacgtcatgaaaaaggaagatggcgagatgtgcggaaggggcgatatccaggtacgtcgccgagccgctggcaatctctccctgctcgtcccctgctaaccgttgtgcacctcgacccgactcacagttcgactttctcgaagccatctttgccgacacgacaaaggcgttttcggcgccgcagattcccttgcatcctcgaccgcttccgccagagaccaagctcactttcggcgagctctattgctacaccttgtccggatcgccgcgagcgaccaagtcgagcaaggaagccttgttgggtctagagccagggaccttgcccggaaagaacaaggccggaacgacggcggcattggcagccaagaggaaaaaggaagccgcttcgaatgggatggatttggccaaggtcgaacaggcttcgggactgatctcggtgacagggagcgtgaacggggcagcaggggatgaagcatcgcaggcgggcggggatgacggagacgaggtggagaattacgaagggctgaaagaagggttgtcaagggtgtgcatgatggtacgtctggggcaggtagcctgggatgctccacaccgatactgattcgccttggggcacagatcaacgttgggcgaataaacacgacgtttgcgtgtaagcacatgatgtagtccaaggtccgactgtgctttactgagtcgtgactctcttaatacgcactttcgtctctagtctatccagtgagccaccgacaacgctgtcatggtcatgcgacggtcggctaacccacctgccatacagctcatgcgaactatgctacggtcatatcactcgatcccatcgctacaaaagtcgacggcgactcggagggcattgcaaggtcagtcgcacgctctactgctccatcgcctcgacgctcacgtcagacgccgaccacagacgctcctcgactgaaaatcatgctcaaggccgtcttgctcgagaacgaggagagcaagaccattcctgtcgggttgaaccagatctgggaccaaggtgagacgggccaatgcccagccaccagcatcagcaatcttctcctcgcattcgcccttcgaccggagccggcacacgagaaattcttcagcgattatcccaaccatgtcaacatgttaacgttgttcacgccgctactcataaaatcgtccgagcgggccaaagcgttcctctacgtcatctaccattatctcgaagcacacggctcgccgaatcctttcgccgacgaaggccagccggacaagatcccgacgctgcacctcttgtcacaggaagactacgatgcgctcggcgaaaacatcgacacgccggaagaggtccaattcggaatcgagatgaaggcgcagaggcttcaatgtgtcgccgagctcgcccagcaaaaggaagaggaagaacgcgtcaaggcggatcctgaactggcggcagccgcggacgccgccttgttgcgtgagacgacgatgtggcccaagcccaaaaaggccagaggacctgcagccaacggcaaaaagagaaagcgagcgagtgatagtcggccaggcgataccagcgatttcctcactcacgaacagctcgaacgggatgcggagaggcatgacacgattagtcagttaaattcgggcaagttctcgagctcatagctgatgtttcgttccccatcaggtcatgatgggtccaggatgactcgagagtattctgacattcaagacgccaagtatgcacctcgatatagctcgtcggtagacgacgactgggcgataggtgtagaaaccctgggccttgatgacgctaccgtccagagtctcatcaatcaggtcaacaaggagtcgtatcactggaacacggcagggatgggtaagtaggacgggcgatgtggccggtgagtgagcgtattactgataccgaacgcgttgtgatccgtcagctccggagagacgggattcgttcgcatacatttcgcccgaacgtgagttttccctttgtaatgggcaaactgcggtactaatgtccgcatgtccagaccatcacatcacaccttcgcgccagatctctacagaaagacaggcgccatctctcgcctacgcagagacccatttgacgccccctcaacaaccgcccaaaacgcattctttgtcttcgctgctcaattgatggtcgacgaaaccttacggcagggtgatcaaaacgttgtatcataacacagtgcatcgcaggtttggccaccttgaagtatccaattgcatatacgtcgtttcacactcgacaaaagtcaagtcacgtgaaatcattctcggactggcgagcttgtgtgacgaatatgcccagacccatccatctgcctggctcgacgatcgttcaatatgtcacgggtcccgagatttagtactttcagaggctgatcagtcaatcgcaaagctcccaaggcgcagcatagacattcagttcagattttgaccatgcagcaaactgcggcgttgttccccatgctttcgcatgcggtaaggcaacaagtgccaggatcgagccggctactcgctaggtctcgaccgttcgtgctagcccatcaccgataccttgctagccaaggccagcaagagccacctttttcgggttcttccgaggccgcttccgagttccggaatagactggagagcgagtccaaagctgcaccgggagacaatgccaaatttggaccggagagattggggccattcccaatgggaggtggtcgtgtgcgagcaaagaagtgggcgccctggaaggatctagacattggtggaaagagtaagccagggcaaggtgtcgtacgaccgagctattctgttttcttatcctgcctctgcagtcgttaggacaacggctcagactggcaacctcacagtcagtcggtagcccgtcatctcttgtccggaaccacctgatctaaacctatccgctcccttcaggttgtagtctttggtggagcattgttcgtcttgctcgcatattcactcagcaccgagctgttctcgcgaaatagcccaactgtgctgctcaatgaagccatagatttgattgaggatagcgagattgtgagtccgttctgtgttccatttcgttccggcttaattgacccgaccttttcgcaatgcagatggatctccatctccttcgaccgtactctttcacccatcttccatctgcctcgtcttcgcgaaggtcatccccggtccagagccaggtcgttcgtaacccggagacaggcaacgaacacctcgtcatgcggttctgggtacacggcaggggaatggacgaaaaagacacgacgatgggatggatcaaggctcggtggagagagggcaaagtctgggtcaagcaggccgtgcgtgatatgggcggcgagccggtagatgagcaggtcgaagtggaaaaggtttccgaaaagaccgtcgtcaagaaggaagagcaaggatggctagcctcgatgttcggagctcttcgaccgtctctgcccaagcagaacaacctgtcaacacccaaaaagaatctgcctcctccaggcacattcactagcggagagggccgggtcgatttttaccgggatccggacagcgggacgtacaagatgttgaccctcacggtagatgtacctgggacgaggaaagccaaccagcgggcggtcctttattggtctgggtctacagaagtcgcaagagagagtatcctggagggaaagagttaccgcattaccttttaagtagcgaggcatcgccagggccattatttacctatgcgtgtatacaaatgacataattcgaacgtgcacagagagatgtacacgagagggcgatgcatgtgggtcatagaagcctgcgcaagtgtatgaggcgatacagcgtgaatgatctggcagcctgttttctttctagacgcagtcttgttgctcgaaggaaaatagatacgtccagacagctcgtaagtcttgggcaaattcgaaatagacgaagacgaaagaaagcgaaggtgattcccgacaccacgcgtgtctgaattgggttagaagtctaccttgttggcacaaaccgtcgtgattcgttgaaagtatcggttgtcgacctcggtcaactgtagtcggaaacgggataatgtcagcaaacgttaccgaccaaagacgtcttgtaagctcacctcggcgacgcagtcctggttcagctgagcgacgtcttcggcaccgtatccatgttcaagtagtatcggttgcatgacctcgaaagaagcggcgatcatgtctgggtcaaagtggtctgaggcaggatcgggatgtccagcgtcaagcgctaaattcgtgatggaccaggatcgaggtgactctgctgacctgaggctacatgtgctcctcctgtgggtatcccaatctcttccacgatcatgtcaggttgactgcgaccaaaagcgaatgatgagacaccgataatcacagtccagttggtctcagacatactcacaatactgcactatttgccaccagcattctcaatcgagacggaacttctgggtcgactttgagtttgagagtcgagatgattcagtcaatcgttccggacgatgcccttgtcacccttttcaacgactcactgcctcgtccacgcagcgcttcccgtaatgccgtctgccacgttctcaagcatgtcgctgctacatacccaggcacagccgaatgctacttcgtccccgggatgcgcagtcagtctccactcgtctgctgaatgaatgcgcagatgacgaacgcacgtaaaaatgttccagctcggtaacgactagcaacccgcccggtctcagaatccttgcgcatcgctcgacgagctggaggtaattgacgatcccggtggaaaggttgcggatatggactacgtcgaacgacccagaggcgtaaggcaacggctgagagacgtctaataggtggcagagtatcaggtcaagattcgaactcagggccgtcgttcaggatgcccaagctcacccaacatagtgaaatcgacgttattgtatggggattcttcttcgacgcttgttcctacgttgctcaaatcaatgctgaagacaattggaacgaacaagacatcagtacaatttgaccctggcctcatcaggacactcggcgatcagattgccaactcactctacgccaatcacgtccgcatacctgattcgccgccgccgaaggaaccggaatcagatagctgaaacgcgacctgaacgtcatgtaccccgaggacgtactcttcttccttgcccaattcgtaagaaaagatccctgtcccacatcctaaatcgagtacgctactcctcctgccttccgcatgggcttgtgctagatgttgcctgatcgtgccccacacattcatccccgtgtgcgacgacaggtatttcagggcaaagtggagggaaacttgtctttgagatgtacgagtcggatcgagcaccagggaggaggaagtggaaggcggagaggggaagtaggcaaagttggcaggcatgggcaattggggagagatggtgtacgggcagatatagtacggaggaagagggaaaggcgggagtgatgttcgggcaggtgaggcgtgcgagatgggggagggtgtcgccgggcaggatcgtgatcggttggcgggcggagaccgagtgtattcgtaagttggcgtagcgggatcgatggtgatcgagagtttttcaacgtccggacgtcgagcgtgatgtagtgtcggcgacgaggtaggaagtgaatgagacggtttaatcgcgatcatggtggaggaggaagaggacaagccaagttagcttgctcgtcaacgacacccgattgagaggtcggagcagtgaaactggaaagtagatggccggacgatcctaatttaagatgtatggctgtgcaattcgacttacgcatcgcaaacatccatatcctctcgttctactgctcttgaattttcgttcctgatgacgaacacatcgaggttttgatcaattggataagaaattccgtggtggctatgtccttttctcttactagtttcctttcgcttaacgttcagtcgcttcgcttcgagcaagattgatcgtttcgacgaaattcctgcctatcgctcgcaaatcgtcgtgcttaaatgacacggagaatgtctcgaacgaattagatcgctcagcaagactgcctttcaccccgatcgcgtttcaccttgtttcacttagaagaacgcgtgatttctgcctgttcgggtcgggcaagaatacgcgtgaaatctccgaaccgaaagacattgcggaggttttcgcgtcagctgaccgttgaccatcgaccaaatcgcacggcctgatcaagccaactgacctatggtaaatcttgtacactactatacccttctagagagaaactacgatcctgttcgtatacttgcaggtagtcgtccgatcgacagttctcagaagggacaggctaaccaggctccgtgattctctttagactgtggcaatcctgatcgatcggcttcctttagccagccttggtcaggtaagagggtcctttggttatgcttctccgaggaagacgggatgggaaaaggagccgatggtcgggcgacctcgccaaggttcctggagacgggatcggtggacgcaatccgagggatccgagcggtccgttaaagggaggctatggcgttgtatcgacccggtccaagtagtcgggtatgattgagggtgtgaattatgatcgaccgacgttcgtaacggtggtggagatggggaggcaatatcgctgacgatacgtccagtgtactattcaagaagtttgagaacgacgacgactcaagcaagatggcaagccggacaagaatgtaagtggacgaggtagatcgaagcgatcaggtcttgggtggcgtaaatcgagtaccttgtttgcccctgatcgatacccgctagaacgtccagtcatcctttatatagacaggacgggatcttgccccttctgtgatggatgatcatcccactgcactaggactcgggattacagatcatcaaagccctcttctcgctgcatccccctcgctcattcatggggtcggacggatgacggatcacacgattcaagcttccatgtcgatcagggagaaagcgggaaggaccgagctgagcctcgtgcatttcggacgctgggtaagcgatccagggggccgaggatgggaacggtggatctcaggggtggaacgaggattcggtgttttgggtacacgaggcaacgatggtaataaggggattgatcgtttcgtagatatcggggattgatagacagggcgagtgacactgcgtcgatcagatcgacttgatgatcagtcgagctagctgcaggagacgacaatggatgaatgaaacgcggtttcttttcgctcgtcatgcgtcaccgggctgctctccgcgcgcgccagagatggggggacgtcgttcgcgtcgactcggtgagtgatcgagtgatcaagagcaaactgaagaacgagggatcccgacaacgcggggctgtaaggattccttgggacaagtataggggatgtgctgccagttgtgtagttcattgccaacaagcgcgaacggtgcacgatatcagccacggagaggatcgaagcgttttcccattcacacgcaatctgcccttcacgcatcacctttcgtccccatactgaaaagcacaagaatatctggagaaccacgttactagaaggatagctgctcttccaccacgtcaggcatgaatagtccagagcggcttgatacagcaaccgaagacgatgaaaagcgtttcggttacctttccccggtcgctctcttctagccggttccagattgaaaagggttcgtagcatgttgatcgagccgcatcaagcaactcggccgagatcgctaattacagtcaatttccccgatggattgttccagactgcgctgatccgggagctatgcaaccgacgcaccctcctttggcaagacgacgcaattgtccggctgtgaaccgatcgcttcggggggaaagtttgccaggacttgcctttcggattcgaggctgtgtctgccctgtgatcccgctttgcacagctcactaatcatgtccgatcgctcatcaagggggttgattgatcagagtgaaacggatcaggcggaagcaaaaacgtctcggcctcgactttcgccgagcggaccttcttcggcgcaacgcggggacgtccttattcaagtcgaggtccagagatactgacctgcactttgccagttcgcagtcgctgtctcacaacaatcatactgattgtaatggtcggcgtagagtgggtttcatcttctgggcggccgagcgacttggcttatgctttcgcgactcgtgactcgtgaattctgttgctccaggtgtggcaaggtcacaaagtcgttggcggacatgtgacgatcctcacttggttgctgctatattctttcccaacgcgttagtctgcaatacatgaagttcaacctgttattagtttgttgtgtctgaaccatgatgaatgccaataaactgaatggtcatgctgacaccgatcgtcctcgctgaaagccggagacgatttgtagacggcgagcatttgcaagtctcaccggagaacgtcgtgagaatgcagtgcgacatgggcgatttggaactacggggtgaaccttttcgcatagattctcctacctgctcgggatcgcaggagacgcctcgatgcagtgaacgtaggaggatcatggcctggatcctgatggggaattgatggaggggttatcgatctcagctgccacaagtcgggtacagatgagtggcaagctagcatggatcactcgattggcggttcccaaggctaacatcccgtcttgacgcgcacccctctctgtagagtttcgcaagatagttgtcccttttgtgttgtgtttctcagaacttgaaggggacatcgagcgaatcttagcagaaagactagaggcatatcgactttgacgcctgtgccaccacgaaagacctccttgtatttgcaatgcaggggtacctctatctccatgccaatttcaggccacaggacccctggataccccatttcgaccggtaggtggcttactctaccgctcaaatagggtagacacataaagcccgacagcgggagaggatctttgagccactgtgtcgcctcgttttgacacctaggcagccaacgaccgcgttcattcacgagagggtcgtgtggcagcggcacgccgatataagcaaagtctgatggcgccgtctcgagctactatcaaaccaactgttcccgtattccgccgttacctacgctcgccttggtccgagatcgattgcgagcgagattcgtccggtcctcgcgaaatcgaatgtgaattcgcaagtcggacccgattgtgaatagtatcatacatcccggtcccccggtatcccgatatcttgacggtgtttcatctcccatcccgatctttcatttcttgcccttcttcttcttcttgccgccacccgtcttcccgctcgtggcagcccccggtgtgaccgcatctccggtgacatccttcatgacggcgtccccacccgcgtcagctccacttggcccggccgccatctcgcctgttgtgtcggtcaagcctgacggtgctgccgttgttgaggatgcggtcggggcagatcgggcggtcatggagaggaggagacgtaggttgagggattcgaaccggttgaggatgatgctcgagcgtgtcttgaatttgagacactacggaggggaaggatgggaggtgttcagtatacgcacgtctgtgtccgatagcgcaagtgcaagggacggcagtgtagaggaagggtaccgaccttgaaatcatccgtcaccttcagaatgagctctccatcctttggtcggaacttgacgcaataccgagcctaccacaccgatacatggggagcggaataaaatcagtctatgctcgcctgcatacacggcggcttgttgaggccgggcggaactcacttttgaaggagacttcttgtacaactcgatagcagcctgaacatgcccgtcaatcgagacaaacctctgtcagtcaccggtgacaccagcataaagcttgagagcggctctcaccgtctcgaaatcctcccaacgcgtaatgtaaaccatcttcctgtctatggatgacaatggatgacttttggtcggtcgtgcgtaaggaagcaggtcgtccgagcttggaagcttttgattcaagacagctccgaatcgatgataagagcagcactcaggacgaaggctggtataggccggggaatctagctcaaaggtatttgcacgagatggtaaagcgatccaagtgcgcaacacatggacacagggttattatcatgaacgagtttggaccagagcatcgttgaccttcgtcgagcctggattcggatccctcgcctgctcgagccggatccgacagaacagtttatcggcttacctaatctcgctgctctcgccggttacgtactaatcacgaggagcgcgttatctcgccggaccgatcgacgtgacgtttgagaacaaagaagatggaatccaattgttgaccgatcaatcccaacgtcggtcgaacccctcattgaatctgacaatagctgcagggcagaaaacaataggatcggaattgataattagaggaaatggtgacatcggcttgtccagaggatcgcacgatgaaacgttgaccgaggggtagatcaataccagacgggccttggcgagaaacctatctcttgtcccgtcagatccgtccgccgcatcaggggtcgacttgaaacgtatatccacaaggaaagcagcgagttgcataatcaaagctatcggatccctcccgctcgccgctcgaggatatcggatcaatccctgcttctacttgacggattcttgcccggccgagccaagggaggaaacctggaggacggcacgagagctacttgattagagtttgacatcactactgcatcaatccttcgggacactgaaagaggacagccttttttccattccacacattccgagcgtcatccggcatctttgatcacatttctttaccccttctccctcgccgtcgccccctttccttccttgaccccggtaccggcatcacctcgggccgtcttttaccattcgagacgtcgagacttcggcaatcgaccacctgctcaacctcgtggctgtcagcccaccacagagtagtccacatcaatttaatcggacgagcgaggaaaacttcgaagtggtcgccaaatcaatcctctctacctcgtgcttctcgtcatcaaccctcatttctcccgatcgctccatctctcctcccgcccgtctctccgcttcttcctggttgaagaacccagcaagagatcgagagaccctcggctatatagactcgacacgcctcgaacgtaaactcgaggagcaaggaggacatggacctcgccaaagagatcttcaactacaacaagaggtgagcgagtcaacggacccggtcttgcaacttcgatcgtcggagcgatctctcttgctgtcggcatactcttccatctttcaactttgctctacttccgtctctgactatcccttcgacggtctttcaccacctcgtcgttttcccatcaccgcatatcaaaaaggataaatcgctgatcagcccataccctcgtcttcacgatctaaccccttacgatcggacacgtcaaataacactgcaaactaccataatcaactacccactcacgtcccgatgatgccctcctcgatcgctacgttcggtcgcaacttgtccaacccgctggccaaccgtgccaggtcgagcacctcggctcggaacggagattccgagacccgctcgaaacgctcagacaagaatcaggatgaagactttttcaagttcaaggagagcaagaaggagagtaaacgggacaagtcggatcccaagctcacgagcaaggcgtcttcctcggatcggatccccatcctaggccgagtttcgacgaacaatctgcccatcgggtccaacctgggcatgacgagtacgcctacaagcaatctgccgagtatcctcaccccggatggccggatggcttcggcagcggccagtccgatcatcccggcggaaacgtccggtagcaacctgaacgctcctggaagccaggcgatgggggctcacaggaagacgagcacagacagtttcggaagtggagggctgggcgtgatgaacctcgagaggctgacgggggaacaaaaggccgtaggagcgttggtcaacaagttgttggtcaaggtgagtcagggcatttttcaacaggatcatgtgaagtttcgattgacacacatgacgcagctaccgctttcgtccggaaggtcgatcgggagtctggattccgatccgatcgtgcaagaaacagtacgaggcctggaaaagctagccgagacccgtttatcggtcgtcgctcatggcctgactggagtgcttgatggactggccaaggtgagtcgagaaggaccgacttgctcgcgggaagaatgtccgctcactcatcaatcggacggacggacgccagcaaacatggaacgtctcgagcgccaatctacccctgaacatgctacagacagagttgttcctgatccgcaccctatcatcttgcatggacgcatattggcgacaccaccaccagctaagcatgcgtacaagtcctcccgaaatggtcgacccggaggaggccaactttcagaaaccctgggcaaatcctccaggaatcgaagaaccgttggccaaattcatcctctcgacgatggtactcctcatgaggatgaccacgtacgaggtctccagcgtagtcgccaattcgcctggttatacgggacctccagccggatcttacatgaccaaaggagagagcaatcatcctagcgtcggcaggagcatcattcggtaccttcacgccggtaattgtggcggggacacggatctcggatttcgctaccgtggtcctcacgacatgcggcatctcgacgtatcgccgtcgtcctttgctggcggagagacggggtccgttttgaaagacaacatatcgatgatcctctcggatccttctttccagcgagggcataagcgcaacgtctcgaccgattcgatcggcgcattcggtgtcgggaactctccggcgtctggactattatacgagatcgccaggacggtcggcaagatcatctactttctgtcttctgcctcctggccggtcctctttgccaggatcaggaaccgagttctatatctcagctcagctactgaagagcatccggatgcgatcgagctgagactgctggactggtgcaacctggatcaggcgcgattggtcctgcttatgaggggtgggtgcaacaggacacttctgttctaatcgaacccgtcaactgaccgataatgccatcgcttgatgtcagaatttacgacccactttttgcatatgaagcggtcggctcaacctgccgtcgcccatgcgatcgaatccatcatcatgaattgggtagaatcgcgtccgtccgaatttgtcaaccttctcaagaacggcaaacggcttgatggaggtgccgaagtgctcttcgaccaagtccacagcctcgcgaccttgcccgagaacaccaagaggctccgcgctttccgacccgcaaaaatggcactcttgatcgtttgccccgacattcttctcaaagcgatgcatggcgagacgacaggaagcatgatgactaagaaggtatgttgtatctgcctactggagaagaaaaggatacgaaactgacggaacgtatgcgcagaccacatatcttgaagtcctacgaaaaaacttgcgatccagcgtggtcgaagacgccgtcctccaggcttacatcaacgcctgtcgagcgggggctgtcattcccctgtctctcactggaactggattacaggaactcgttggcgatatcatgagggaactcaaggtaggtgagggtccgttcacagaacattccagatttaataacccgaattgctttccaaaggacggtttgtatgggaacgcacaaatatcagaacagcgagaggataatcttctcatcgacggctttgccggcttgtatctcatcaaaccgccattctgtcagaacgctgtgcctgccttgatcaccgacgcatcgacgccaaagattcgcagggtgctggccacagcctgcactgtcctagaaatggaggtaagcgacgcccttgaagcccgctccttgggtgtctcttctgaaccaatctttttactcgcagtcgacgtgtaatccgcaaaggaaaaccacacagcagctgcgggagatgatcgctcctacgctacgaagttggctaaaaggttccgctcggacgattgttagtgctcaaggcacgactgacaataccgtcatgcgaggctatatcggtcgacccgagacgcaatcccatagggaggccaccacgatcgtccaaagtatcctgacgctctatgccattgagcccgcatgggcaatcgagaaggctgcaccagtccctcgccttggcagatcaggatccaacggacttcccggtgacctgacttatgatcaccgttttggcatcgacgtcaacgaggacagtctttcagcactggtagcggtattgtcctcgttgacgcctaaagcggtgtcagacggataccgtgacggcttggcatctgcgctgagggcgattcagacacatctcatcgcgcttgaatacgacacgacactcaacattggtctaaaacggacaatgaataggatgaagtaagtgacggagcgaaggattacaattcagagatactaaaactgatatattttgtgcgagttagttctgtccttctgcgagacgctgcattgcgttgtgtggacatcatgctcgcgtttcccgtgcgatctggtctgcaggtagccatatccgacgtgatcgctcaagcggaattgtcacttcgcgtgtggaaagagatagttttggtatgtcgggatgcatctgcttcgaccgagaccgtagacactgatctggactgcataaagatatgcggcccctccgccaacatggctgaggcattcaccgctctagcgttggcagacgtgatactgatcgcgtatctggtatcaaacgaacacgaagaggtggaaaggtgccttcgagccatagtttacctcggggatctgcggaatgaagccttcccggacttggatcggctgtcaggtgtcatggagcacgacatgatactttggtttcaatttatggccgaatttgctgaggtcatcaagcaggaacgcctaagcgaagagggtgagtgtgatctctgctgagagcatggaagtgaattgaccgaattcgcaaaaaaaagttcggagcgagcagcagaaacgaattcggtcaaccttgcgtcatcatgctgttcagtgcagcacagcacatgttctgtgggatctgcaatactgccgatacgacaggctctccagcaacatcatccaaggcacgtctgctgctggcatgcacgtggcgtcggacttgtcgatcgaagtcatgccctcgaccccttcgcacgccctgttccagaacctgacattgtttttagctgctttcaacggctcacctcagacccaggacagtccgaaaagccgcttcggtaccgagctttcagcgttgttgcgcaaatgggaaacggctctcgatgctgcgtccctgccggtcttcttcgagaccatcaccgaccttactgtcgcggactcaccagtcatacgttacactagtgtgcaagttgggtcagaagtcgctatgccatacctgcgtctattggtcatgcagttgagcaagtaagcttggaccgctgagccataaccatacagcattgtgaagctgacttgaccggcttctccacagtctgatgcaacatagcatcagcaacggaatcgttgagcgcaatgacgcatttgacatgtttgccgacaactgttctgccatcttgaagggcatccaggagcggcaattggaacaagcttcagacgctttgcggaaaaccccggaactgcctcggctcattttcatgcttgcgcattacgccgacgagatgaccggagcgatcgcagagcgttgtcgctcgcgtatcgtatcgcaactggcagatggggtggattgttcgactctgaacaatgtgtccaagacatcgctgctgctcatcctggagtcgtggatggagggtcaagcgcaggatggtgaatccgatcagcgcaaaccttatgcgtcacacatgcgaggcaagccgagcaacgccggcgaccatctcaaggctttggtcaggctcagcgataggtgcacgttcgacgtggactccgttcgggacagtcggatgacgcccgctcatctgttcgcttctcatatggacttcttcactcgacatgctctacgtgtgtctcaagtcagccaagtgagtaatgtgcggtagatagcatagtcaagtacctgctgacatacgaatgtctaaatgatccctgtccgatatcaggtcgagagcgctgttcagctctctctgatgaagcaggtcatctcgaatctaatggtcaataacgcggactttgcgattcgaatcgtctcaccgaaacttctcacacctgaggccgatgttcgcactctctacatagccggggcggttgacgtacttgaacacagtaacgtcgatctggttttaaacccaggtaaagtggagggggaagactccaaacctttcaccaaggtcagtccctttgcttcgcaaaagctaacgatgtccgttcgctgactgggactttcaccgtaattcagctgctacttcagcgagatgtgagtgtggcttccgaccaatttacgcgttctcatttttttaatttccttctgcttcaacagctgcgtctggtgaaagcgctagtgcagatctgttcggtcgccgagtcagatgtcctatcaatggccatctttaggatttgggagcgagaaggttcccttttgctacttatcaaggggatgctgacagaggaagtgcgaatgacaggtatgcaaacccgattgatacatcttcgtgagatcaatgctaagtgtttccacgaatagattcgcaagctcagctcttcaggactaattctgtcactactagaatcgtcgccttctatatcaagactgttgctttcaactatttccgaggactacttcaaccacttatggatcggctgagagtatctgaattggatagctcaccagcaaccatcggcatactgtcccagatggtgatcgacgatttgactagaaccatggatgtgccagctcctgttcgccaggtgttgggcctggtttcagcggctgccatgaccaaattcccggaggcccggtctcaagcggtggctagcttcttgattttgcgagtgctttgcccggctatcatctccccggaacgtctcgacttgcaagtctcggcggaccatcggcgtactctggtccaggtatcaaaagtcatcatcaacgtggccaacaatcaattctttgcgagcaaagagatgcagttatctagcttgaacgagctggtcggcaagaatgtggttcctatcgctcaagcaatgacagagcttggatctcagacaccgcttctcaatacacagtcaggactagatgaggacgttcatgtgacaaggtcgacggacccccttgccatcgaggcagacgaatcatatcttcgatactatatgacgaagagcgagacgagatcggctctagcaaagaacccgaatgtcgaaaacttcatcccgttgatcgagctgttgagacggacttcgaacagcgggacaagcaatcgcgttacatcatatgaagagtaagtcagcagctctgaaggtacggtcaggcaaagcgctcacgaatgattacagactcagccgacggcgcggtgttaggcatgcgaaggcctcgtcctggttctacgaggggacgcccagtactacggcaagtatggctcagtctctgttctcgcgaggcaactgcttatacttcgaccatacagggtgcccgcatgttctatttctgcgctggagaagaagacatcctctatgacgaagcgtttttgaagcacgtgctgagggtatgtcttcgaaattgcatcggaggatggtctctatgctgatccgatcttttctgcaaagtccttggctgatgtccagaattgggagttggtaatcgacttgaccggtttccaagatcagcctccagccatgtttgtggagcgtcttttcgctgtctgtcctatctctgccgttgagggtttgaggacggtagctttattccagccaaatttcgccagcttccctgccttgaaaagcatcttcatcctattgacctgctcaggtaagcacctcgtttcgatggacgctcgtcgagatccttgctgatactaaatgcacctgtggttctaggcttggcatgcgagactaaagtggtcgcagtcgcctcgcctagtcaactgatgactagtatctcctactcgcatctggacttgccagccacgtcaggtatgtttgaactcatatcaaggcttccaaggatgccattattgatcccacctgtcattcagtggctgtttccgagttcccttctcagcaagtctattacgacatcttcttcgagatcgaggatgcacgtcagattcccattctaggctattacaaggatgggtttgtggtcctgcaaagtcgcgtcaaacaggagctgttggatggcatgacatccgagttgacagaggtttatcgaatcgaagacgtcaatgatcacgttctgagcaagatcagcgggccaggtatgtcgaagtcgaagcccgcataaaaaggcagccgcttacgcatacatgcgaatgaactaggtgctagccctcttttgcgagtcatcaaggacgctcgtcgggccttctcaaagacatcccggccgcgccgtcacttcaaggctcaggagccccaacgtctcacgacatcggtagtagtactttgcgcggctctgttctctctcatcagctcggacgacgtcgattgtcgtgtagccgcgctcggcctgttacgagcagcaaacgaatgtttcgcgttcggcttgtccgcccgtagtctccgtcttgatggtaagtggtttccacttagcttgaccggacgtcatgaaactgacctgctcgtcccattcagatccccctgtggaacacgtcctacggattggggtggagctggcaaaatacttgccgcatatgagcgtcgagatggctgaagaactgatacgactgctcagccatgtaccgccggaacatcgtcttgactttgtgaccctgacctcggcttggctcggatccagtatatcacgatcgctcacggatggcgaacttcatgcggagcgcctaaagatgactcgaacgctaacgagagcactcgttagcttgatggcccaggaatcagatgtgagtctcggcgaagcttgcggacgtccgtctggtgattaacctgcgcttctcgaattcaggacttttcttgggtggatcctttgttccaacagctaggtgacaagagtcacccagacgttcaggagattgtcctcgagaccatgatcagccaagctgtggaactaggtcgtaattacccggccgtcgcaaaagtcgctcgggcgctggacatttgcaacgcggacgggttgaccattcgtctggcaactatccttcgtaaagtgagaccagcttgtgtgaccgaagccgccgttctttcatcccttctgacaccatcgagctgtaggaaatcaccagtacaagtcacaacccggctgcaacgctgaataaccacgcgaactggaagaagatcagctgcttagtcgagcttttgcgcgttcgccttcaaaagccgtctaccttgacggacatcgctgttgcagttcccgacattgtcttttcactcttgatgactggtggcctcggagctaccgacgtacgaacaacagtgcaaggcttgctgacagcaattgtccgtgatctggtcgcgatgtctccccgcgaagacggcgacaagaatcgcaagcggttgaatttcttggcccagtttcaagccctggcgctccttcagaaatcggacggatcggctagcacgaccaagaagcgcatagaaatgcacatggaaacattgtcacgtgtcaggaaattctggactctggcaatagagctgctcgagtggtgtgctcctagtaacggtaagaaagtcgcctaggcttcgcagatgataaaagagcgctaagacttggtctcctccagatgctctgaatcagtggatgagccggctctctggactgttggcagccaattgtttccagaggaatgatgcagtccaacaccgggccctcatcgcctttggagtcttttcttctaccgtctcgcctggcgaaatcgaggacgatctactggtcagtaccatttctttcgcgagcactgcccatctgtgcgacatcagagctgaagtattcgtgcccgcagtaccaattgatcgttgcgtctcaaaacgccatctcggtctctgactccgaggagatcgttatcagtctggtcagatgtctatctcttgtggtcaaaggcatctctcgggacagtccgtacgcgaccggcgcaaacagcctgtggtggcttggaatcaccttgttgcagactgcgaaagagtctttgcggctggctgctctcgagctctgtcaagccatcctcgaccaagcaaagatccgtaatacccgcaatcaacaccggacctacgagatgctgttcgagaagcgaatgacgggctattctcacttggacatggcgactggggtcaatttcgacaacgagaccaattggggtttcagcacagttgccctgctctatccaggactccgagatgacgtctgcaaagatcgaacacacaagctgctgggcgacttgttgagtttgacactcgcggaatcccctacatcgtcattagtgaccggcgctgctcttccgctttatgtggccttgtacactggagcgccaacggaagccagtcgccggactctgtgggcagagaccctccatgtgcacggaagcaagagcaagacgatgccttcgctgctgtccatgttggacattccgtaagtgaacagtactttcgaaacccgatataattccgagcctgaccagcgtgacaattcgcagtgacaattcgacagctgtattgcttgtttcgttcctttttgccatgctcaaggcatcagagaacaacgaagacgagaggatggtactgtcggagacgcttgccgatgctgccaaccaacttccagaaatcgtgctcatgttgtgagtgtcaagccaagcctcgaatagactcccagctgagacgcacgccatcgttttcagatttggtcactggcaaccgactctgcttgcgctgctgggtacggagaacgctcgcatcctaagagcggtcaccagcgtccttgcactaggcagtcttcgacgagatgcgtaccatcaccaggaaggcgggaggacggcctctcgtctatccgtcgacaccaattccgagggcgggatggacgccttgcgtgacatgggaatgatcagcgtggagaatctctcattatcgagcgcgagctcggaacggtaagctcgacgactttgtcgctacccgtttgcgtattcaggactgatcatatgggccttccttttcttcctttagaacgatcgtactgcgtacgctggcggctcaggcgatcgggcatattaccacttcagagcagacttggtagtctttctctcgatgaggacatcacgaacgataacgcttataatgatcacgaagaagacggattcccgtttgcatcatgttgtatatactcacgaacaggctaggatgatgaaaggttgtcatttgcatcggcatcatattattatcattgttgcgcttctgcttgaatatctatgatatccgaatcctcggcggttgaacgactttccatcttctagttcgcgactcggtaatgccgatcgttgtgtcgtgtactctcgatggcaagtccacgaatcatctacgatcatatctcagcagactccagtactttggatcatgtctaatgcatcttactcgtgcactttaccagatccctcgttagaatgggcaccgccgccttatcaagctcctcacctgttggggacttaccgacatatcccttcaagagagatcgaacacgacgcccctcctacagcttactacgctggagctccagttggatgcgatctcaataacggcttcgctcagagaaaggagagggaccctcgcctagtcgaacatctcgatgggctatgcgaaggcttgattcggtatgcaagaaggaaaggcggcctgaagaagggcgctctcatcacctggagaggtatgcttaccaggtacgcccatatgatttgccaatcgatctggacctcttgagtctgacggcacgaaagattccgacagactcctcgtggcggcgtttaacgatagagacgtctgggagatgagtgctttggccctggacggcaacgtctacctcgaagattgcgtatcacccgaggcaaccgaacgacggcaagtctgatcgaaattcctggcaatcgatgttagctgatctgctcatcttaatagcattactgaggatcagaagtcggcgatcttcagctattatggctacgcctttgagtcgtactccacgctcaagaacgtaccaaccggacctggagaccgacggtcgcatgaatggaccgaggacatggccgtgaatacgaacgaacaatggtgttgcatagccaagtccaaaatcggaggagccaggctgtatatgggtggcgaagttgactgtgtcgagggtgggtcaatgcgatgtcggatcgggagccccggctgacagaacgagaacgtgaacacagggccctggcggaactcgcttgcggattgtgttgagctcaagacgaacatgcttatcaaggacgcaaggggacagaccaatttcgagcggtcagtgaagaccgtcctagtatactgtatcttgcagatctgatgtgccacgagcctgtttgtaggaaactcatgaagcactgggcgcagtccatgctactgggtgtaccggcaagtcgtgctcagccgcagcgactcgatcatgttgactaatcaacgatacgggcacctagagcgtcgaagtaggattccgagacagtaggggtgtactgcaacagacccagcggttcgagacgatgcggataccggcaatgtcagtgctatcgcgtgcaatcgtgggtcgatcgcagaatctgatcgaatctatcatgacagggtgaagtcttccaacgagaggagtccgttatggacctcccgacagtgcttgagaacctttgccatgctcgccggcaccattctggcaaccatcttgcccaccgatccgatcccgaattggcaagaagcagatatcgaatcccggttaaaactacccgcccctgtcatctggcgtatcgcattcgtgccgaagcaaggcattaccctaactcttaaagatgacgcttggcgaggagacgaaggaaggtggggattcctgccgctttcgtatgttcaagagctggtagatgctccttgagaaccgttgtcttgattcgagagaatttgaggctcggtctgaccccaaatgcattcgaatggccatatgatcacgttcctacttggagcgagcttcttgatgtgcattgcgtgaagaggaaatgactgaatcacgagctcttccgtgatgggcatagtcgccttagccaaggtagacatgggatgatcacacaaaagcgtagtagtcacatggtacaagatatgctaaagacaaagaagcgaaagaataatcacgagtccgttctttctcctggccaaacgcactgttgcgcaggaagaaaagaaccccttctctccccatttttgttcaccattcggttcgacctctctcgtcgcggcccttttcgaaccgacatgtatcgctctatacggcctgaccttcggggaccttgccctctgccaacattcgttccaatcgcttgacctcttcgagactcgacgctcccttgatggcctctctcaccctcgccttttcgtcatccgtcatcgtcctgctcgccgatccgttgacggccttgcttccgccggatgactgggccagtacagcgttggctgcggcattggcagcgttggtagcggcctcggacgtgagcgaatgagcgagttgcgagggaagaccggtctcggcgtcctcgaacagggctttagcggatgctcgctctgcctctttaatcctcttgtaatcgagcactcggaggttggtctttccgagctgcacaaccgtgcagcaaagatcggggaatagattttcagtaatcgtcctttacgtgccgcaatcgactccaccaggactcaccttccatatcagccattcccgatagtgcttttccgacctcacggggtttccgatcagagacaagtgttccagcttttgacagtttgccagaggaaggagagcggagagggatgcgagcgagttcgagttgaggactgcaagtcgaggggaaagagaaacggtatcgtcagcctgatccgaggtcgggagtgagaccgacgagaccggagtcgagatgacttactgagagtctctaggtgtggtacctgcagaattcgataaccgaggagtcagccgccgaatcaccgagctatgtgccatcaaagagtctctcaaactcacactcgtagccaggttaggcgctatcgacgagatgttgttcaaccccacatggatcgctcttatacgaggcgctgcgagtcaaaagccgatcccgatactgtcagcgggcctgcctattcgcgaaatgcgctggtaggaccggattggatggctcaccgagaggaatatttcccaagctgatcaaggcgttgtcggtcaggttgagggtgtcgtacgtgcccaggtgcgaagcgaggttctcgatcaagggaatttgcagacctgcagcagaccgagtggtagatgttcacgagtttgtttgatacgcggccacatgcgaatcgccacagtcatgagagtagagatatgagcgaacaggaccttgggcgcttggcaaagcaatcgaagcttaccccgaagttcgagctctcgttctttcaaagcgttcaagtgctattgattcaccacccattccgaatcaggcccatgacttctcgctcggtctcattctgtgtactaaccgtttggctcttggccatcacctagagaacagatgcagaggggaaggagagattcatcgttgagctgatcggtatttgcgagaagtgggtcggatactccgcttgtgaccgagaggaagagggcaaagatgcttacctcgggagtcaacctcatcttgcaagatgtaggcaggcgttcgaaatgttttttgtagagagcagcagcagcgggtcgtttgatatgagccgcaccgatacgatcagttggatcagttgatttagaaacactgacaaccgatgatatggtctgtccaagtggtcgacgggagcgagaggatccgggatgaggttgatattgacacgtcattttgttggtcgatcgatatttatttgtcgcggccagtgcatgagtttgtgcggcatccatagtgagtagtggtcggattaatttgataacgaccatggggagcaacagcatatcgctcgctcaaccccctcatcaatcaacatcattccgggggttcaacagacttagatcacggtgaatgaaaccaatcacactagcttaacgaccagtctcacgaatcttcacaccgctcaaatagtcatatcattcatccgatctgtctcctggtctgaatcttgaaggttcaatcacaccgcatcgaccaagacgacgaaatactcttcacgacctgccaaaaataaacaaaagacccaactcgactcctctccagacgtccttgcgactgcccgtccacttgcaggccaactctgccaagcatgacggacattggatcttccacctctcaattcgctagcaacgcgacggggatgaccatgcgggagcacaacggtgctaatcccaacggcgcattctccgactcgcacgagtctggcatcacccatcattcggacgagatggaccgttcaccttcgcccactcctccaggatatggcggataccagcaaaactcgaacgggaatcatccgaacgtctttggagattacgggcagcctaccgctgcgggacctcctgcggtcaagggccaggggcatcatcagcaggcgatcaacgtcaaccacaacaacaataacaacaacatgtccggatcttcatcgggattgcaaggcgtggccgggatggtcaggaagaaactcggcaactttgtcgggttcgccaatctgcccgatcaggtacatagacggagcgtcaggtgagaccgccttggggggtcgctccccgtcgtgtgcataggaaacaggtgttgatgcgacttgtttcacgcgcgtgatcgtcctgtgttccgtcaggcgaggattccagttcaccgccatggtagtcggtgagtctcccttcttcaacaagcaaatccgttgcagtcgctttgactgacattgacacgcccacacccgtttccctcgaattgccaggcgattccggtctgggtaaatccaccttgatcaacaccttgttcgagaacaagctgtttgacctggaacaacggtccaggaacgcggctcctcccccagggaccgaccggggcaggacggtcgggatcgagagcatcagttcgggtgagtcggaatgcggaaaggttcaatcagtcttcatgaaggcatcgactgatttaagcggtcctggatagatatcgaggagaacggggtcaaattgaggttgactgtggtggatacgcccggatatggagactttgtcaataacgacgattcgtgagtctcggtggctcgaagttcgatattcgagtcccgctcattgaccgcctcgttggcttgctggacatagctggaaacccatcgtggacaacatcgaggctcggttcgacgcttacctcgaacaggaaaaccgggtcaatcgggcaaagttggtcgacaacaggattcacgcgtgcatctactttatccagcctaccggacactcgtgagtcaccgcgacagtacctctgggagaaacaacgtcgtgatagaggtttgtacgtctttcaggttgaaacccttggatatcgagtttatgcgacgtctacataacaaggtcaacttgattcccgtcatcgccaaagctgataccttgacggacgatgaagtgtccgctttcaagcgcagggtgagacgacccgattttggccagatcaccagaacatcagagttgacaaaaagctaccgtgcccgatccagatcttggatgacatccaccatcaccggattcagatcttccagcctcctgtctacgagaacgaagatgaggagacgatcgcggagaacgaagagatcctggtacgtctcacgaataggccaggccgaggtgctatgcgcacttagctgatttgatttatcctcatagagcaaggtcccgttcgccattgtcggttcggactcgatggtctcgacgctagacggacgcaccgtgcggggtcgagcttacccctggggaacgatcgaggtcgagaacgagagccattgcgacttcgtcaagcttcgtcagatgttgattcacactcacatggaggagctgagggaacacaccaatgacgtcttgtacgaagggtacaggagcgaaaagctgatcgccatgggcgtcaaccaggacgcgagcgtgttcagggagatcaagtcagtatctgttggggctgaaatcgttagtcgatatgctgatcgtgcggaattcatcaatttgctagccctgccgccaagcaggccgaagagcgaaaactgcacgaggtgagcttcaatttcttccatgcgtccgcgtaactcaagctgaatcagtcttccattcgacgacgcaggccaagttgtccaagatggaagccgagatgaaaatggtcttccagcaaaaggttcaagaaaaggagagcaaactcaagatctcggaagaagagctttacgcgcgtcacaaggagatgaaggatgcgttggacaagcagaggatggagctcgaggacaagaagaggaggatcgagagcggtcgaccgcctacccccgacaagtctggcagcgtgagtacagggtttatcaaccacattgctcgacacaaggctgatcggggtggggtgtcttgtcacggtcttcgacgctacagaaaaagaaccgattcggtatcggcaagtaagcggggagatggtcctgaccttccggatctcgtttctccattactcgcttctcgatccttgatgaacaacgctggctcgctcggtttacgattctgaatatacgtcaagacggtcgggagcttacaagacgacctgcaccttgtcgaccttctcgtccagggtagcacggtcgtggcaaagctctcgatctggcacgaaatttcttccctttccctttgtcgccgagaactcggtactcaacggcaaggctttatttgctttttggacatcttgttggcgctcgtgaccctttgtgctgttctcttattaacgttggatgatgacatttgaatgatacctctttttttccgtttcgttctggattgggtcgcgatgatggttgaattagattctaccgcctgtcgcgcgtttcagattgatcgtcgttttcgccatcaactcgatcaggttctcatcaaagtcacgcgacacaagctacatataagggtcaacgagccgactcgttgcaaacgaatctgtgtcatagtcatacgcatctcgtgactttgaattcacaacaacgtacgcctcgatttgcactagctcctcaggttgtcagtgtcgtcctccgccgtaaacatcacgagcccaagtggaaacatgccgtccaccgttcgtaaccagacggcccgggatcaccgctcccggccatactctacttcggaagggtcaaagtatgcacacaataatcgatcgaaatgtcttcggaacgagcagaaggcatacgaggagaggccgaaataccataaagcatggtacgaaagtcgacatgacgaggacgccgtcatcctgagatcgtcagtattgatgcgctgagctcatctcctaagattcttatgctaacaatttgccactacagctcaaccggacttctctttgcggtgagtaccaatcgctttttgtatccttctatcttgcatggccttgacgagatttcctttttacatcatggcaggtctcggactactatctaaaggcgaataggtgaacatgcggtatcaaaattgagacagtgatcctgggttacttattccttatttccacagcccgtatatgaaggaactccttaccaaactaccggaatcatcatccgaaaagaggactatcgacttcaaggcgttccacccacaagtcatctccctcgtactcgattttgtcagcaatcgcggcgatcgtctatcccagatcaacagagcccagaagtacatccaggtcaaagcttttgccgatcgcttcgcccatagaggcttgttcgaccgtttgaaccagatcagggacgccgttacgctctccgatccgctcgggttcatgcaaattctggtcgacgaagccgtctcctttgctcaaggagcacacatgaagtccaagatgaaaggcatcataagagacatctctcagctgaccaacaattccgaggcatataaggggacgatcagctcgatcgcttgggacctcctctctgaagcacttgctgcatcgggatcatctgcaattccttccttgtctcatcggaaacagccgactcagtcaaagcaatcgacccaagtgacttcggagatcaagcaccgtattcaggacgacgtaacctcgctcatccgtgagctcaagacagcgttcaccagtgacgctgcactcgatgacgcacgaaatcgcatgtacacctcggatgagatgcgggacgtcatctacgcgctcaaagaccagttttacatcacgagcgagaaccattatcccgctcgttggtcatcctacaacgagagcatctacgggaatgacatcaccgaatgggacactcccgcacgtgcactctctaccaagacagctcagtcgttggggatgcccttttaccgagcgttcactttcagcctcgatgaggtgctcgtgcaacacaactttcgttcgggatacctcagggacccgagagcgccgcttcctcatcaccctcagcttcacgaactcagcactactgcggatcaggaagatgaggtcatccttcttcagcaagatcagccgcgaggtccatctaccgagtcgacgtctacgtctgttcctcgcgagatcacgcccgagctcgacttgaggtcgatgttaggtgacgcgagtcctaccctcaggtctccgacgcccgagagtaccgtacttcttcctaaaacattcagcatatcattgaatccgcccactccggccccagcttcactcgtcgccccgcatcagcaagcggctcactcgcaactttccgacacctcgatagtgtgcgggtaccgctcgaccagcaggcatccgtccgctagccctgcgtcaaacctcaactgggagcacgacggaacctttcgaacgccgcccagccagacgctgttccacaccgtaggtggcaagaagaacgcgcagcccaaaacgacccagcccgaggtgaaagatgaacctgaggcgatttcggattcgaggaaggacgagtacgagtattcgggattgccgctctggcaagatgtctggcaaaggatgaaagactacttgaaagctggtcagtcgttgtccaccgttctcagcatatctggatcacgtttctgatcattcatagattggagcagaactgaacccctcctccggaggctttgaatgggacgagtctgaaccagaagagtcggacgatacacgttgcgacgagtacgaccgatcctcagacatggacatgcgagaagacgaccgagtggacgaagctcaatctgactaaagatgagactgatttgaacagcctctcaatacaagtaaacttgaagtcagaatgccatcttagtttcccattttcattttcgtctgatacattttgaaaatcacgttctgcctgtgtccgaatacaacatttgtatcgatcccatcattacggctcgacgtatctgcatgtagcccatcgtctcgtatcctgaatgtcgaaccaccgaaaatcacaccatagccgccttgtcatccattttcggtcgagctgccctccattcgtcttcgctagccgcttgatcccatttgacccgctcgatcagcaagtcaatgtccttgacagcttggtctttgagatgccgatcgatatcacccgcatcagggagggtctcgcgttgtttgcccttgcgtgaggtctgagtaggcggagcaaggtaatcgacgttgctaggtatcgtcggcgtgtgcaagctcggctcggggagtcgacccgatggtagagaaggcgacggagcctattcgtgtggtcacagaaggtcaggtgacgttttttcgacgactcgacgaccttttcactgaccgactgcgctgcatgatgctcatacccgctcttgaccctgttattgctcgaaccctccctgagaatccacaaccgatcagctccgcgagactccgaccccaatcgtctgatcgttctaaaggcgacatacctgatctctgcgatcaaatcttccagctcgtaccatcccatgaaattatataccagcgttttccggtaatacgacgcaaggtcccatttgcccttgacggcgtgtaggtggacgtgcgcgtaagggtgtttcggatcgcctgtcgagccgaggtcacgacaggtgagcatggccgtgaaccagaggaaggatctcggaggggctgctctagataggaaattcgacgacgacttgagactcacggatgggaccgacgacgaaaccgatctttttctctcccgtccgcgaaccttgatgacctgacgagtctttatctagcagatcattggcgatcctcaacgttcgtaccaagagtggtacatctgcccgcccctatgaaaatcatatatgagcactcagcgaactgccgctctcggaacatcgatgtagaactactcacgaattcgtacacgctctctacgtgagcgttgaaagccaataccaagtgtctctcccctgaagccaaggcttcccccgtcgacctgtctgctgcccagacggacaagtcttcatccatatacacggctcgtcttccatccgccgagttcgaggccgacgatcccgatgccgaggacgggaccgtcaagggtacatgcgccgtcggtgaattcgggaatcgagatccgccttgcacggtaggggaagacatgttgggggagaggttcgggttccacggggtacggtaagcgtggtccacgtcgaccagggtgctctgattggaacttgatccggtattttgtagcgtggtgatgatggtgcatagagagcagcctgcccggggagcgtgggtggtaggtcgttgcatcgcgtcccgttgacgagtcttgcgtgccgaactagatctctggctatattactgtcgccgaagtgtatgctggcgacggcagtgatgtggatctatcagaagaccagtccaagaacttgagagtaaggggatcgagttgtatgaattgatgagacgtttgagcggttctggggaatatgtggattgcgcagtcgaatgttcggtatcttggttatcggagtccgggtcccatctcgcttgcggatcttgcttgctcaagggtctcttccagcgttttattttgcacgatatgtattgagatatctctatgtgtgacttgcgatatccgatctactcgacaggcttacttgcaccataccgagtacgtgatagggggtcgtcgagaatcgcctcgacctcgactcgacctggctctggttgctcgccgatcgtttcgccatttaacggaagcaaaaatcggggaattcactggtgaaccccggcagagtaaagtacatgtacagccatatcgatgccatttcaagtcgatatgcaacatctcaatgctcacaccaagcctcgaccgatagcaccgatcgccatagatgatgtttcgacgctttctcagctcttcgacacgcctgctgaatcaatcggcagtggcgtcgtcctcttcgaccggggtcaaacgattacctcggatcacgctctacaccggtggccccgaatgtagtctttgcgacgtaagtacaacgctctcgattcagcccagattcaggggtgcaaaatcatagagtcgatgttcattctgccgtccttctccgtcaacgcatctatcctattgtagatcgccaaacaagatctgcagatcatccgatatactcatcccttcgacctggaaaccttcaacatccacgagcctcccgcgtcggtcgaccccgtacaagccgaaaagatcagggaagactacaaattcgacatcgtgagtgcacctcgcagcttctagttctccattgacccagcttctcgaattacaaacacatgactaacgcggaatatacctggtcgtctgatcctctagcccatcctccacctggacgatcattacatccagaaacaccgcgtcaactctaccgtcctcaaacagaccctcgaggcgtacgatccgacggatccttccccccgatacgccgagaacaagtttaggaaggaccctcgacccgtacccgggataggcaagaagaagcggggcaagggcaagaggttggccaaggcgagggcggagatcaaggaggcagaggataaggaaagagaggcattggcacgcgcaaaggagcaggagcagcaaggcgagggtgagggcgagggtgggagcgtgcaaagtgacaaggtggatttcagggcggaagggcaggccggttcggatgtcgggggacgaggatagggaatgatctcgtctcggaggcaagctcacatactcactgagcgcgacgctggtcggttgtaagcagtacataaggacaggtcgagcatccccataatcgcattattttacctttacgaccaccatgtgacggatgatgatggcagccttcggatgtggtatgaaagcgtttcccagacagctgatctactgcctgttgacatccttcctagctatttcgaagtgcaagctgatgttgaggggataactcagcctttgcccaattatgcgccagctgcagggtgacctgcagtagttgtcagcatgcctttgccaaatcctccaatattcttgcatctataaaacaattcagcatggccttcgtgaacgtcgtgtcctacgcgcttctaaatcttctattcatcttgcacatcaaccctgacgacacattttacaagctagcggaaaagtacctgagaacgtgggtccgaccaatatcatgtcagcgacatcacctcaatcaacacgctcacagacagggtctgtgatgggactcgggcactcactcgtcgatctcccatgcggcgctccagtagacaaccttggctttgagacccttttctttggcttcctccttgatacgtccttcgagctcgtagccttttcgaacgagacagatgtcttgcctgttgaataaaggccatgtcgaaggccgcttgggatcagcttcaaagacatcgcgaagcgccacggacgtcatccctcgagcccagggtgtaaaaccagactcactctcgcatcctcaagagcgggcagaaatcgttcccgccatccccgacgtagacgatcttgtcgaacgcctgcatcccacccctagagctcaaccaacgttccaactcgtcccccttgcacatgttgacgagacatccgacttggcaatcgtgctgatcgggagagtccttggggatgagtcgaccgacgaggagggtatcccgggattgggtgtcccaatgcgcggggttggtgatgatcgtggtgaagaggtcggtcaggccgtggtgctacagggtagccaggagcgaattagctatcagcacggaacgaaacgcgtcgttcgttgaaggaaggcaataggcgttgttgctgaccttgaggatagtatcgatgtagatctcgttcgagttggagagacagatgaacgtggtatcgggcgaacgtttctggagctcggtgaccgcgcgtttcatggcagggtgcttgtaggtcgatccgaatgccaaatgagcgtgaggatcttgggttcgagagcggggtcatggaaaaggagaacatcggctcacaagaggcaatacgcggagagcgtcgaggacctgttcttgggtaaacccatcgttggcgaggtcgatcatacactcggctctgcgagcgcggcgagcccttcttgatcagccttcaacccttcaagaggggttcgacaaagagttggcttcactcacacgacatccggagtacactgactgccaccgctcttgatggtctgcaactttcgtcggagcttggtgctcaggacttcgaggacgaatcggtccgtgtcttggtcgacgaaagaccaatcaaagtcgaacacgacgagctgttttccagagttgctaggggacatggtgaacggtgtgcttgccaattctttcggatctctatcgaagaggtcgttgtggtgtgttgtttgtgctataagatcgggagtgttgcttgatctggataagagtatgctgtccatgactactacttttgatctttcgggtcgatttctaggtggaggtcgaggggaaaggagaacgagcggaagcaaataagcaaggatgaggagcagggttcaaggtcggggtcatgattcaaacttgctaaacttgatacagacttgattcatatgcatcgcttgaccgtttcattaccagcagaacaccaaacgagcggtcgagtggataggccctcaactggcttgcctctgagaaccatgcagggtaaggtgaaacagggagcccagccaagttacacgtgagctgacattagcaacttccaggtctcacttcctatgacgactcagacccagactcaccaccaacacacgcacccacatcccgacgaggtggttcaggaggactatcctcggatagtaaaaccgtacggggactgaaaaatgtacgtacatgctcctccagcgcccacctcgagcttggcggaggaaacacataaaaaggagcgtgctggaaaccatccccctcctgcctctctatcttcctgtatctctccccatccataacaatactgggcaacctacggaaccctttcgatcggctcggaactgtgaaatcattcaacctccgctctgaatccacggggtcgagggcgtcttggggtctggtcggtcgcttagagtgttgatggacgggattcgaaaacaggtcagtcgtcgtgtctatgccgtcgatcccgtccccggactcgcgctcaaacctgaacaccacttgccgatatcccgcacacgtcacttccataggtctagatggcacgggatcggatccaagccggacgataacgagcatagcactcaatccgggacgaccatccacaccacgcgttcccagccctcaggcccagcaatcgagcgcgagcgcgttcaacaccaagaaacccctctcgataggcatcaaactcaaccgacagaattccaacgcacccgtcacacctggggggtctcaatcccgatcgtatggccggatggggacgggagccaagtcgaggttcgatgagcctgatcaggagcaggtcgacagtagtcgatcgggcgagatgggtcccgccgacgacgaagacaacgacgagggtgggaacgatgatggtggactagcgggtgggttgacagaggacgagttgttcagaaagatgaccgcccctcgagggtggaccgccacgggttgggaagacgaggccgggcccgttcaggcggaaagctcggcatcgggatcgggttccgcattagggacagggacgaggtcccgcgagctatgggagattcccgagttgactgccgaattgccagagccgggattgcaggtcagtacacgcgccttgccgtccatctctactttgaggctaacgctgaaccgatggtatgcgttcccgtatggtcattctagaacaaggtggatacctacctgaaactcaagctcgagcgggatcagcacatcaatacgaccttgttgtcgtctaccgcgtttgccaacccgcacatctattccaagctagtcagtcgagacgcctgatttccttctttttattttattttttatcgaataccgcccgactcatccctgttgaaacctcgtatcgactgatctacaggtcgaattcgtcaacattgacgaacgcggtaccgcctttcccgactctggctggttgacccgtcggggcttggaagaccgacgatcggtctggggcgcgaaacacctcgctgacctccaaaagcgcgatcgagacgccgtcgagcgtgttcagagggaaggaggtcggagggggatagatttcgcccctgccgcgtctcgatcgaccttgtctggaccggggaacaagggtacgaccgtcgtcagcaaggggaaagaaaggcaatcgcaatcgggggattacccgtttgtgctttccctaccggatcagctcgcacgtccgagtgggtcgaagcgggacgacagggatcgggagcgggatagggatagggatagggggaaacgcaaggatcggggtgggcctgggattggggaagatgatgcgaggtatgaacgggaaaaggagaggaagcgcgagaggtggaaggatggtggctgaagggtgcggggtcggaccggggatgtatagatcgttctccatctatcattattcgggatgtaccgcgttggggtctcggaaaggtatatcattagagtatcgaatcgataacgtacaatacgtatcggatgatgttcacaacgcggagaaatggcggtcagtctcatgatcacagtaatgctagtaatgatagccatgacttgacctacctcacctcgtctctccatgtttcactcatgtggttgggctttcttgccggtttccccggtttcgatcgatcgaccgaccacctgctgccaactggccaactggtgttgctggttgctcgtgtcacgcacgcacggtccggaatggttccgtatcgcgcgacgtctcctcctcctcctcccccgccttctctgctcgcccgccctcgcctcgtcgcttttcggtcaaatccgaatcgatcccgcccgcgacgaccaacaacgaacgaacgaccgacgacgagagagaggatcgttcgggtcattcccccccctcctcccccttgacctctctctagctaaacctcccatgtgcacctccgatccatacaaccaacccccttatcaatcagtcaggcaaccactcgaatcaagaacctatatatacatacatcctgcccgtctacacactctgtcaacttgcctcactgaccccctcaagctgcactcacaaacgatgggatccgccgcttccaaacccgcctccacgtcttccacccccaacttgacccccatctctaccgtaaagtacgacgagaaacgcccagccgcttctatatccaacatgaccgccatgtcttccgtcaaccgggctcgtaaccacgatgacgatggtcgagcgggtacgaccgagactggtctgacccggtccaagttggacgcttggcaggaggatttcgacgccgtcagtgatccataccatacccgactccctttccatcctccatcctcccccctccttcaagccgcacgctcaacctgctccttgttgcctacagaccccgacgcttaaactctctcaattgatcctgagcaacgccgaccccaagacctcgctcgtctcccgcgaaagactcatccaggaccaacccgtcttcaacctcgaactcaagggggtccccgacaaggacggaaagaacaagaagggagtctacccggggccgatcactaatcagaagagttcggggaggtgttggttgttcgcgaccagtgagtcgagcccgtacaaggggggagtgcgatcgtaacggacagctgaacgccgtctccctctctctctctctctctctctctctgtcactttcctcggacgcatagccaactgtctgaggtaccgagtcgtcccccagttgaacctaggcgatttccagctctcccagtcttacttgttcttttacgacaagctcgagtgagtgggacgtgcgcgtgcggcgtagctttcgatgggattcgtctgattctgtccaacctccccctccgtggttcctttcttggtcatcgctcgtcgtgtctgtcgccgccgcctccataggaaggccaactttttcctcgagtgagtttcgcatgcccatccggatcagattgactcgacgccaactcgtcttccgcgtgcttccgctctggcagaaacgtcctggatctcgtcgatgagccgctcgattccaggatcatggagtacctgaacagggaccccgtcggtgacggtggtcagttcgacatggccgtgaacattgtcgaggtgagcgtcagacgggatgcaagaccgagtcacacctcgggaaacaacggttactgaccacggtacgcacgcactcgctcattggcaaccaccatagaaatacgggatcgtccctcaagccgtctaccccgagtctttcacctcgtcacaatcgggaccgatcaaccagatcgtcacctcgaagctgcgcgagtttggtctcgaactccgtaggatcgtcgccgaccttcgtaccgcgtcgtccaccgtctccaaggaccgagccaccgaacgcgcgaggacgcgcaaggacgagatgatgcgcaccatctttgatgtcctctcttgctccatgggcaccccgcccaagcccgacgtaccgttcttctgggagacgtacgatagggacggcaagtacctcaaggtcgagatgactcccaaagcgttctacaagaagtacaccgggccttatcgtccgagcgagtgtttctcgttgatcaacgatccgaggaacgactacgaaaagttgtacaccgtcgagaggctcggaaacgtctcgggtggattgtccgtccgatgtgagtcgacccgggcggttcaggaccgaatgctcgcggtgatacgtcgtatgctcatcccggagcgcctctttcctcccgactaagacgtcaacgcgcccacctcggcactcgaaaaggccgtcatcgcgtgtatcaaggccgaccaaccggtctttttcggaagcgatgccggggctcccggtgtcaggactgaagggatctgggataccaagatctttgactaccaggtgggtgttgagcgcgattccgtgtcccgcccatgtgctgagactgacgacacgtctgctgcacccttgatttctgcagcgagcctacgggtttacgctcgggatgaacaaggcgcagaggctcgagacgggcgatagtctcgccaaccacgccatggtcatcaccgcggtccacctgaacgaacagggagagccggtgaggtacaagatcgaaaactcgtggtctaacgctgcagggaacaacggatttttcatgttcgtgagcttcgtatgactcgtgggcattgaatttgggtgctgatggacgacgatcgtcacatcgaataggtgcaccgccgattggttcagagagtacgtctaccaggtcgtcattcccgagaaattggccgagggcaagtgggtggatatcttgaaaaaggccgagcccgtcgtcttgcccgcttgggaccccatgggtgccttggcttgacgagtcggcgcatcgaggagaatcgaatgtctggatcgcaattaagaggtgtatgtcaaataaaaagaaacgtcattgtaatttcgaacagtttatggtcatgaaagtgtcaatcgcgacgttcaccttgaagcgtctccatgacggtgatgggttgggcaagaccggctttgcgcctgtgatggtcattaattgtatgtttacaagttccctcccgctaggcatcatacaaactaggtcgtcgtcaaattggcccgtgtctacaaagtcacctgtgcaagcgcatcgaacgctgaaaagcaacgggataaaagggaaagcgagcgcttggggcggaattttgacagtctcctgcgacgtcgtggtcatcatgctcgggataggttttggtattgcgtcgtcgtattctcgtactccttttgaaacagtcggtccatctccttgatcatccatctgaagagtggcgcgaagcgtaagctcaggccgatcgtagcttccgatgacgggctcacttcatgaattcagccaaatgatcccggagcaagttgaccgactcggtgtccatgttcgtatgtgcgataaaggacggcagattgactagcatatcgaacgtgagctcgggatcagccgggttttccactcgagccctgcgcgcgtgggaactcaccaaacagccgcaacagatgctcggccccgtaaatctcgctcatcgccttttcctccttggtctctttccgcatattgacgtactgtgcccgctcgaatctgtacaacaggttattgcctaggcacttgtcaaagtagacgacgagcccggccatgatctcgtccaacagcgcgtctgcgcgtctttgggcacacacgcgaacaaaagagggttccggcgtcagccttagaggtcggacgtgaaccctggagtcgtaagtgacgatgttgaagacttacgttgccttcttatctacccgtttcttctgacagtactctttgtactcttccacaatttccttgacgtttggcgttcggggtaatgtcacgagctgccggtcacgagtttcgtcaatcgcgacattcgcatgcgcgatatcgagtcgtatctaacctgattgttcttggtcacggcttcccagtcatctaccagtttcactcggagcacgtcggggatgggaattttcacctcgggtcgtttcatatattgttcctcctgcgaaatcccgagttcagcaaacgcatcgactggctcgcggcaagcagttcgtgaccctgctagctctggctcccgcccgactgaccgtatcgaaagcttcccctcgcgtccgcttcttgcccttggtatcctgcttggcgactccctttcccttgtccaccgtcccgttcggtgcgggcgaagcagcgtccgatcgactcgaagccttttccgtggcgcccgacttggccagctttgcagcattctgcgcggctatcgcttcttcccgtagacgtttctgcttttcccgcccggccttgtcgtccttcatgagtctcgtctcgggaacccattcgtcccatcttcgagcccggggtgacgggggtttgtaattttgagctcgggttcgtgtatggtagctgaggtcgagtcgtcgactcacgactttctccatcctttataatgcactctgtagtgcggcccgacaaccccgctcttcgtctcctttgcatcccacttgaccgtatccagtacctagagcataccaatcacttgctttaggaatgtccggttgatttgatagccacgtctgtagccagagcgtctcacctgggcctcgtagatcaatggcccgtgaaagcagagtacattctcctttggcgtgtaattaaactcctccatcttcttaagcgggtcaagtgatccttgagccgtttgtccttcagaatgtaaatcttgtctcagcttgaggaaactggaatttctccgtccgacttggtccttatgccgctggcacttgtacactctgaggccctttcaaggccatttgacctgattgctaggttgtcccttcaactttgaggatgtcagtcactaggcgttgagcgcgtcgccggctcgagccgatcgaacgagcgcgtctttggaagaggaggagcgagttgacgaggattatcgtgaacagggggacgacaatcattcgcctaacccacctcctttctgcagattactcacgatctcgatagactggtcaagtcgccttctgcatacttgctatcagatatcctttataatagaccggtttgccgtcgagtttggataggccgactggaataactcatccataccatctcaaaggcgatcgaaccaactgcagctttttcttgcatgatgtcatccgtcaagacgtttgccgtgcccatcgagaacacccgagtgagtctcgcaccttttcatttggcataggtgggtcaatcagagctgaaatctagctggtcgacccgtagaacgtgacagtattcgcccacgtcgatcatgggaagacgtcctttgtcgattcactactgtccgccaacaatatcatctcgtcccgtttggcaggaaagatccgatacctcgattcgcgagaggacgagcaggagagaggtatcactatggagagtagtgctgtgagtttctggcgaatgtcgaagccgtagctgacgagtgatgagctgagagacggatactcgctaggtctcgcttgcctttcaaatgctaaggagatccaaggataacccaggtacgttttctcataccacgccgatcggcatttcccattaatactgatgttgtcatccagacccaatcccttgccaccatatcctaaacctaatcgataccccgggacatgtggatttcgcctcggaggtatcgactgcctctcgtttgtgcgacggaacgctcgtattggtagatgttgtcgaaggggtttgcactcaggtgagcccatgttcggtatgcctcttccaaagaagtccggctgaggaatccctcgttcgaactcccagacgatcgcagtgctacgacaagcctggatggacaacctgaaacccatcttggtcatcaacaagatggaccgcctgatcatcgagctcaagctctctccctccgaggcataccatcatctgtctcaactgatcgagcaggtcaacgccgtcatgggcagtttctttgcgagcgagaggatggaggaagatttgcggtggcgagagatgcgggaagctcgattggcggcgcgcaaggctagggaagaggagatggacgatcagacgaccgggccagatgacgaggatgatggcgagttcgaggaaaaggaggacgaggacttgtactttgctccggaaaagggcaacgtcatcttcgcctcggccatcaacgggtgggctttccgactcggtcggttcgcgcagctttatgcggccaaactaggtatccaggagcaaaagcttcgacgggtgctttggggagacttttacttggaccccaagacgaagcgggtcgtcgggaggaaaaaggctttcgagggaggcaaggggcggtccttgaaaccgttgtttgtgcaattcatcctggacaatatttggaaagtgtacgaaacggtcctcgaagagcagtgagtggcgtcgtttcggctatctatgtgatcgaagcccgctcaaggagatcgtttttagtaatcctgacaaggtgcaaaagatcgtcacggcactgaacctaaagattaaccctcgagagctcaagagcaaggataccaagaacctgctcaccgtcatctttcagcaatggttgccactctcgacttgcgccttccaagccgtagtcgatatcattccttcgccccttaccgcacagccgatccgtctgccccggatgctgcacccgacggtttacacgtcgccatcggccggcgcgattaagccgaacaacaagctcgaagaagacctgtacgcttgtcatcagggagaaaaggataacgtggttgcctacgtgagcaagatgtttgcgattcccaagtccgaactcccggagaagcgtcgaaaagaggtcacggctgccgagatgcgggagcgagggcgcgttgagagagaaaagcgggctgccgccgctgctgctgccgctgaagcgggcggtgaggaagctgctgcctatgtgcccctcgatagcgcggtcctgaacggtcaacctgacactgtggcgcccgaggagcaagctgccgatgacactgaagatgtcactggagaagccttgatcgggttcgctcggatctattcgggaactatcaagcggggcagcacggtttattgcattttgccaaagtacgacgcttcgatgccccgagatcaccccaagaatgcccgtttcattcaaacggcgacgatcacgaacctttacatgatgatgggccgggaactggtccctgtcgagatcgtccctgcagggaacattttcgccattggaggtttggagggcaaggttttgcgaaacgctacgctttgcgcccccggtacggatggagttacagagtcgaccgcttcagacgaatcgatcgtcaatttggctggagtggctatgcaaaccgcgccgatcgtgcgagtcgcattggaacctgccattccgtgtgagtaggatgtgtgtcatcgtccagatgcagtgtcgtcgtactgacgcctgcggcccgtcatagctgatctgcccaagctggtagaaggtctgcgactgctcaatcaagccgacccttgcgtagaggtattggtccaggagactggagagcatgtcatcttgactgctggggaattgcatctcgaggtatgtgtttaagagtgcaagctgtttggatcgcctctgatgccaaaagatttgccaccgtagcgatgcctgaaagacctccgcgaaagattcgcgaagtgtgcaatcagcgcttccgaagcgatcgtgcccttccgagagaccgccgtcaaagccacggaaatgaatccgtcgaagtcgaccgaagggtctcgaggaaagttcgtgggcacaagtgtcgcctcgtttgtcacggtcacaattcaatcggcacttttacccgagtctgtggtcgaattcttgcaacatactgctagtaccatccagacgttgcaagaccaagatcgacaggtgcagacagacgaaggccgcgacgacgtgaccaccgatcgaaatgctcagctcatgcagccggtagacttttggaacaagctgtccactttgttggatgctgctggcccggaatggaaaggcacagctgatcacatttgggcatttggccccaagcgaatcggaccgaatcttctgatcgacaaaactggttccacctcgagaggtcttcgtgctaagagtcagctgatctcggaggcgcaagcccaaggcaagacggccgcggaagtagccgatcttgtcacgcaaatgcgcggcgtcaacgttagcgacgaggctgtgctcgatgagatcgacgaaaaggcgaatcagcgattgctcagcgagtttgacaacaacatcgagacggggttccagcttgccacatatagaggacctctgtgcgccgagccggtcataggaatggcttatatcgtagaaaagatcgagatcgccaagggcgacgacggcgatgattcccgtgggtagtcttgatcgtattgacacagcaacctcgctcacccatatgtgtcttgcctttagtcaagagccgaatgccacaggtcactggttccgtcatctcggctgttcgagatgcttgccgtaacggtctcctagattggtcgcctcgtatcatgcttgccatgtactcgtgtgacattcaggcatcaagtgagattggcaccgcgtacatgcggctagaataaattcgctgactccggtaatcctgcgatgtctacctagctgacgtacttggaaaagtatatgccgtcgtcgcaagacgccgtgggcgaatcgtttcagaggaaatgaaggaggggacgtcgttctttaccatccgagcgttgcttcccgtagtcgagtctttcggatttgccgacggtgggtggcggcaagctcactcgattgcaaccagaacctggctgactctgcgttacgaacaacagagatccgaaagcgaacatcaggagcggctagtcctcaactgatcttcaacgggtacgtgttggctgcttcgtcagttgatgacctccccacctttgactaacgcgctcgcgcactcaggttcgagatgctcgatgaggatcccttctgggtcccgacgacggaggaagagctggaagactttggtgaaaaggccgacaaggccaacatcgcgcggacctatgccgacggggtgaggaagcgaaagggaatgtttgtcgagcagaaagtggtcgagcacgcggaaaagcagaggactttgaagcgatagtttggcaaggggggaggagagcgaggagggggtaacgcatcgtatagtcaacaacaagcattatccatgcatggttcgaaccagaaaagtctttccgcgagtttcggatgtccagtcggagttactttgagcgctgccgttgcgatcgcctctagctctgccgtgatgctctcatgtatgccgctgccgtagtcatcgttccagcgggacggggcgtctgtccgtctgatcgaggtcccaaatcgttattgtatatcacaagcacatctctcgcgctttacacccagctcgcctcggcatcgcccatccgtgtcctgtcgtcccctcccacccaagaaaatccgatccaagaaaagaacaaaagagtggaaaaccctcctatccctctcttctctacttcttcctctcgacctcgatgttgtcgtagtacgcccgctcgttgttctcggcctcgacctcgaggacaagaggggtcatgtatcggttgtcctgtggggcgtgcacgcgatccaagatgtagcaatttggatgtcaagtgagggagtgatgcgagacgaaaagcgatgcgttgaaaaagaggcaaagggggaatcaaattgatccaccgggagagaggaacaagggagacgttcataaagtgcgagcgagatatcagatacccttccctggtcgattcgtgagaaactacaaaaacgaaaagactgacctgctcgggggtgacccattgttccttgggaagacccttgtgcaagatggactgctgtatggcggtcctgattcggaaggcgcggtcgtactgctcacgctcggatagacgggagatagcctgagagaggtcgtaaacaggagggagggtgggttagctgacgatctctggcggtcgaaaccgaagagaatctgcggctcaaggaaaaatgacgagcaagggaagagcgggggacgaaccttttgcacatcctcacgttcctccatcagcaggtcgtcccacttcaaacccatcgatcggtgaccggcggccttggcgtagagctcagcgacgggcttgagagccctgaagagcgagggcgagtagctcttgattgaaggagcgagactgtatgaggatgaatagggacaaggaagagaaatacggatcgggaatggtgcgtgtaagaaaatgcgaattgttgccctgaagatcgagctggaggctagacttgcgaaaaagagagagcaccccagaccattttgttgttcgattgatatctacgtcaagtgtaaagtataaacggggttcgaacggtaatcgaattccttgagcaggttgtaggttgtcgatctcgataatcgatggttgttacgtttgtgagatcgggggtcgaatcctcgaggtggggtcatgagcggcgggatggaccatctttgattggccaaactagggagagcgcagccgggaaccgtcgcgcttcggggcgggacaagaggggaatgggtgaatgatcgatgccgtgatatatcgttatcactgccggcatcattgtatcggaagcatcaccagcactttgatctggccctccctctgccccgctgttgccgcacatcgcatcgccgctgataacccacccaccctaaggcaaattcactcgaatcccttgactcacttgccgcccgacagccttaaatactttacgccatcgaaatggatcgcccgtatcatggtctcgtggggcatcgtgacgatttgcaccgccgccgtgaccagctacgaggggctcattgtggtacgaatattcctcggtattgccgaggctgggttcttcccaggtatcatgatgtacctctgtttctgtgagtgctactcggccgagagtaaccgccaacgtcggctgacctaaagctcctaaagggtatccacctcatcaacgagctgtaagtcgcaagatccgccgcagctctagctcctacgctcatcctcttcggcacagacccggatggccatcttttccgctagcattgccgtcgccggagcgttcggcggtctcatcgcgactggagtatcgttcatgtcagggttgagcggactatacggctggcaatggctgtgagtcgagtttccagagctgagaacatgcttcccagtactgatcacgtcgaccgcaacagcttcatcctcgagggtatccccgccgtcatcgtcggcgtcctggtctatttctttcttcccgactatcctcagtgagcgaggcacctgcatcggaccattcgcagcgtatactgactcgacgacttggctacaggaccgccaaatggctcaatgacgaggagcgtgactgggccgtccgtcggatgggcgagtttgcacccaagggcactgacaagcatttcgacaaggacgactttatcgccaccatcacggcgcccatgttttggatctttgcggtacaatacttcttcatgaccaactcgttgaacgcattcggctactttgctcctaccatcatcagcaatattgggttcaccggatgtgagtgggatctgacgagagacaccggctgtgatctgactcgatgcgtcttgaccgcttgcagacaagggccagcttctgacggtcccgccgaatgtaagcaggtgcttcatcgtatagccacggttcgtcgactgactttgccgtcataggtctttgcctttttcgtcatcattggcaactcgtggcactcggatcgatcgagggagcgtcctttgcacgttatcgcaggtctgatattcgtcgcaataggctacgtcctcctcgctgccgtcaagaacactgccgggcgatacattggggtgttcatgatcgcctgtaccaacgccgccgtcatcccctttatcgcttatcgaacgtgagtcccaaccacacaattgaagactctgatcgtctgactcggtgtgtatccttcttcagcgcgacggtcaccggagctacgagcaccgcgatcgcaacgggaggagtaatcgctatcgccaacgtagccggaggcaagttccatcgtatgattaacgagatgccatccatcctgactcggactcccctgttcttgcagccgttgctccttacctgttccgagcacaggatgcgtaagcccattcgttgtcgctggcccttgggcgcaaattgaccatcctgtacccttctcctagaccccattattaccccggtctctggacgatctttgcgatgctaggcgcgtccgtcctgatcactacctacctgcgattcaaactcggcggctcttcggaataccgcgagaacattgtcgtcaacgagaacaccggcgagcaagatgccgaactccccacggtgctggcagaggacgaagatggagatgagaaaaaggccaaagcggccgactcaagcaaggtcacggtgttgaccaaagaagcggtttgagaaggcttgcggcgttgtaatagatacatagatttgccggttacattgacatgatgattcagacgggcttgagaagctagtcgcttagaccggcacgagacgagatgaacccgatcagaacccggtggcaggatgtgtcattgtctgggggaaggagcgaaacaatactacctactcggccttacgcagcctcggaacggatgacctttccgacgacctgcgcctgtgccaatatattgcaaagcagcttctgcacatcccatccgatggcttcggccgccatcaatacgagcgaagcctgatcgtctctgccgggtcttccaggaccagtcgcgttctgagtcaaccagaggtagtctcgggtttagtcgaatctctcgccagtgcgcgggcttggctactcaccggcttcatgttgatgtcgaagagatagaacggccctcctgagacctgcctccttgcgtcaattcggatgggagccagcgtgttgagcctatcgccgaccatctcggcccaccgctggacgtccctatagtggcgatcttgctgatgtttctcggcactgacggcttgggaattggcggtaacaggaaccacaccgttgtaaggcgcgatgcctgcgatgtgggcaagagaacaatgtcagctatcgtggacgtgctgacccggagaccgagcgttacttgccatcgacgtggtcgaatcgccggatcacaggaagagcccaatgggattgcttgacaccgacgtcctaccgccagaaatattagcccagctttccgagtagtcagtcccgatgttcctcacctcgtacgtcccgggaggcaagacggtgatggtgatctcttcgtcggcgcagtaggactggcagaaaagcacgttacatcagtctgccgtcgccagatatcttgtccgagcgactcacctcgacgataatagcacttccttcttcccacaatttgccggccttgtcgactagctctccccgggtcctagcaagggtcactccgtatgaacctctcccccgcaccggcttcaaaacggcaggtagctcgacctcgcctttcaagacgtcgacatcgccctcgcgaaccaaccagctcttaggaaacttgccctgcaagtcgccgctgttgagccaacggttgacccacgccttgtcttcgtacttttccgtgtccagaggattttgaccgacgtaccgagtcgtcttgggtagctcgctggcgagcttgatcaacgggtgtttcgaatgcaaggtcgagttggcccacagcacgttggctcccccggcgacggcatcgaggattccctgctcagtgtcggggaatgaccagtcggcatccttggaagcatcaggggtcgatacgggcaagacgacctgaaccccggcggctcgtagattgtatgcgatatcggctccactgtcgcggtatcctagcagtattccaagtcgtgtcagtcgggatgtcaacgttatgagatgccgatgacgacgtcgactcaccgccaggcttggcaggcttgacgattccattgatggcaggaggaggcgcggcttggtagagaatggcgattcgaaagccagcaagtggtttgaatagaggcatggtcggcgatggtttgtgatgtattgttgaactggttcctccacgatcttgctgaccagagtccattccagccagatgcgagccagtctttatatccgaactctgcgtctatgtcgagtcattgatcctcgatacaacggtaccaggtgaccatatgcacgcgtacaagctcatgatctggtcgaatcaggacgttcgaggtcggaggtatcggtaaaagtcggtatacgtggagctgacgacgtggggggttcctagctggcggcggtagggagacgtatctcgacctattgtcgtccttttcgttcgaggtgtttcattattattgttgaaggaaatatgactattcggcctcgacgctgcattgctattcgatcttgctatcctcgagaatacgtaggtcgcggttcggatatacgccggcgttgatcgagtgaccttgtcgcgacggatcgtcaacattgcaggctcgttcgaatcccccagaacttcgttgtcattaaattttgctctaccgagacttgaaggctcttctagctatgctagactcctacgaaacgctcgaatcgatcacttggaagatcattcgacatcggttcctttgaatatgtttccggaaattcagcagaaagcttccgggagacgctcgggggttagcagtcacgagatcgctcaaccctcggcgatccacatgcacgtttcagtcagctggctggtcggtcgacgccctgaacacactcgcagggcaagtagcctgtgattttcaggggcgaatggtggattgaaggtctctcgggtacctttcaatacgcccacacaggacaacaaagatcgtcaaggttcgttcgaggttgtatttgctcggtaccgaggaaccgaatgggtcgaccgctcgcataatatgctttggaaaagtggcgttcttgaaacttacattatagagttctgctttcaaaggagggtctctcgtgaatcttcagtcaagtgacttggccctcgtgaatgggggctcgtgacgaccagaaggaaggtgatttgaccacatcctgcagccgcgaacgcgaagacaagcatatataaggcgagcctactgggtttgctttcttgatctcgagtcgaaatccggtcataccatcactttcgtctcgactgaactcaccccgcctcacccacaaaccaatacaacccgtgagatgcgacgatctttctgcatgagtttcattccgcccatactgactcgtcgcgatgtgccgcttgcagcgtaccaaccacatcatcacaatgtcgaccacctacgagaccgttttcaaccaggcgttcttcaacaacggcgtcaaccttagccctcaggaacacgccgagggcaggatggccgccttgcgtcaaagctacatcaacacggccatgttggacccgagggtcggcgccgccagcttcggtctcgtcaccgccaacggagttggcaacgaatggaccgtcaagttcaacgagaaggcgccctataccatcaccgttcagtttgatattccgaaaaaggacaggtggaccggcaagagaacccgtaagatcgggtatactctctcggtcattgtcgttcagaccaacattccgaacgtggctacgccctccatgagcgcgccgcctcagtaccacctctcgctcgcctgagctggctctattatcgatcgtcaagtcatcccggaccactagggatgaaagccttatcgctatccggtactccttttcgctatcgaaccttgctaggctgctgccattaccatgtagtgattgtacccttgattcaagttcgccgtcctatgttcctcctttacgtctacgaaaacttgtcatcctgtgaatacgattgattatcacttcttcttagaggggcttcatttcgtcaatccaactgaaacaaggctttgagtccagacgagattgtgcctaggcgcgacattgtgctcagattatcgcagcgcgctgctctatcggcggagattctcgctcgtttctgttgagccgcgatcaaggcgcatcagagaagccatgaatcgagcgatgagagtacggatatatagtatatgcttgggataatgcatgatgtcctatacttcctcgtggacatgtacgagtacgtagggtcatcgcgacgcgtcctttgtcgctggtcacttctttcttcgccaacatcaagccctcctccacgacaaggattagtgacctagtagatgggcatcttgaaagcttccagctcatattgccaagtatccacggatgcttggtcgtattcgcaagcttgctcgccctgcttgttccaagagggacgcaaaggccaggcgcacagtccttgctctcctgcaaagtctccagagacgactgtggcattgagaatctctggcgtcataccctgctcgacccaagcgatcaagtccgtgagaggggtgacggggaagggtccattcggttgcgccgcattgcggctgcaatgtccagctccgggaaccaagaacagccgataccagtctgcgagggcggcgtggctcgcattgaaatccatgccggggtacatgatttgcgccacttgatcgtagtaatgaaccgaggacgcggccggtatagagtcgtcgggctcgccatgataatggataaccttcccgccgctcgcctcgaacgcggacaggtccggccaagtggtttgcaaagtcgagtagaacttgtgcatcccctcgtccatccagtcttttaaggtatcgtacgtgacgccttgcagggggagcgtatccaggtccagctcttgcacccttcgggtgatgaaagtaatcccgagcacacccgtcggcaactcccactcgccggtagtctcgttatagacggtcggagaagcgtcgctgaaactagcgcttggctgccaagaaaagtacgcctgcttgccgtcacttgttttgagaccgtccaggatggtctgcgcgacatcaacggcttgttgctgaaccgtcccgttctgggctgttctagcagggctcctcatgctggcttcctgggctgggcatgcgtaggattggccgactaccgtcgagatgttgtagcccaacttgcacaagtcgctcctcgaaaccacaccatccgtccttccatccagtgggtcacacgcgatgatcgtcgcgttaacgatgtattccaattcgcacgggttgggtacatagcccaaggtctcctcgacaaccggtggaaacagatgattcgtccgttggtgcgcgtatctaaaagccggcgctccgatgacgagaccgtcaaagtcgtcatacctctgcagctgactcatcccctctctaccaccctccgaacatccttggtaataggcgtagatcctgctcgaattgtacgtgttgctcgacaagatcttcccaatctggacaagctcgtggtgcgcctggtatccgaacatggtgataccgtgccagttcagagtgccattggcgataagatcgacgccgtcggtgtcaaattcggtcgagaagctaccgaatccgccatcagtgattcctgcgactgcgccataagctagtccggcagcgttggcctgtagacccgagttgatggcctcaccgccgccaccctgcgacaggtaccgatcttgaaaagtgctcggctcgggtagccagaagttgatcaatacttggtcgttcaagccctcatgagcgtaggcgagggttacattgcaatacgagtagttggaggatccagaagtataattctgcaccgcggtttcaatcaaggtcgggtcaaagttgagaccggtcaagtttgtgggaagggcggaccctatgtaagacgtcgtgcagatgtcgttcaaggtcatggcttgaaccatggagatgccgagtgtagaaccaagcatgaaaatctgggcttgtcgcatgatcgaagggcgaagcaggatgaagtgtgatcgtgttattctgccttgagccgatttcgctgttcgagaccatggtcacccgcccgacaaggtcccgtatatatacacatcaggcatgcggcttccatagagcgatcctctggcggccaactagaggcaatttagcgttcgaacgctaagctactgcgcttgccgctcttcacgttcaacacagcatccagcattgtcgcggttcaaaccctatttaggttgagcgcggcgataaaaaaagtcgaaagcgatcggaattcgccgcactttctacaaagtgggtcagaggtgatctgcaggcacgcggcaatgcacgacgagctgttgctacagaccaaatcagcaacgtccgcagtctccttttgacttgacccgaaacctatcacgaaggcctacctaagggttaggtgcatacccaataattcttccgcgattatcgacggaaactcttccccgccatcgattcattatggaacacgaggaaagaccccgggctctacccgtgctatcgcttcgagaaatactcgagcccccgtactggtcgacaccagggccctgtgccagggataacgtttggctgaaaggatgaccaattccagacccaaaccttcctcaatgcttgactcgttttcgaattcaaccccgaacccggctcgacggagatcttcggtcctcgatctatcggacgattaaggggcccgacgatgcctccacaagatggattatcgggacccccaactagtgcgatatgcttcgagccaatggccaccgtcgcaacgcgtttaagtcgccgatcgaccggccggtaccagtcgaatatggctcaaacgcatgacgaatcgtggtcgatcgactctgctccgcgggacgtcgagttatttttaaccgggctcgtctcggtaatcgcctttttttcgtgttttcgttctcaacctatataatctcgacgagttccaagagcgacaggctgcatctctcttctcatgcgagtagactgggcgcaggaccagatcatcgtcccgcagccatgcaagaagccaaggaaatcacgccgttctgcgaagacaatcaccccgtcgcatcgcaccagttgcccgcagtggacaaacccgaggtcggcacaacgtatgagattcgaccagatggacccgtgagtgtgcgattcaatgcacacgacccagaggatcctcaacatggctggtctagtgtgaaacgatggagaggtacgcggactgctaatcgggaaggacgatagcgaagctgatacggtcgagtctcgctgtagttctcttcgtggcactttttgtgacgtacacttcggcctgtaagtcacaggacgccttggtgtcatgagatctcatgctgattgctccatctcttcgtgactagtcaacgcatccgtacgctcccaattcgcatctcttgtgttctggatttctgacatacagcgcaccgcttcaaacaggcaaatggcgcagtttcaagcccgttccgacgggaccatccgggcgtgacgtccgaggtgttccagacgtcgagtttcacctacctggccatgctcgtaagaatcgcgttggtgtagcgcaaccggagcgcgagctgatctgcaacgtagggtatcggacctctggtcttcgcgcccgtctccgaaacttttgggcgccgacccatgttggcgatcttgacattcctgtaagtatcagatcgcgactctcctcgcgactcctcgctaagtgcacaacactgcgacgcatagcatcatgatcctgtttctcccgcaagcattggcccccaacgtcgcctcgatcatcgcctctcgattcgtccagggcacattcgcctgtatcgaaggacccgtcgctgccggcgtcgtagccgacctctttcccaaagccgttcgaggtcctgccatgggaacgttcgtgttgaccgtgttcaccgccaagtaagttacgtattcggagatggccattcgagacgcatcctgactcgaggcgtcgctaccagcgctaccggcccgctttgcgccaactggatcgcccaaaagctcacctggcaatgggtctactgggtacagctctgcgcaggtggactttgctgggttctttgcgtcttcttctttcccgagactcgaggcgatgtcattctcaagaagcgctgcgccaagctcgaaaaggaaactggcaagcatcactttgtccacggactcgacgtccatgagagctggggcgaggccttcaaggtatcctgttccaggccgctcctctatctcgtacgtcgacagggtgcaggtcgaaagcagtggtgtcggagctgacaacgccgatttcgcagttcaccgaaccgatcgtcacttcgctagctctctgggtaggattcgcatggggcatggtcttgtgagtcgcaaagcgagcaaactcaacccgggcctgtcacttatcatacaccctgatagcctttttgtcggctctatcgttcacgtctttgaaaagacttatgggttttcggctggacaaggaggaaccgtcctgatcactggtaggttgggaaggtgttgctgtcaccctcgcgatacggctgacgacgacatccacttctttaggcttcatcggcgcggtccttggctggttgaccaactatttcatccaggaacgattctaccagcgttcgcttgagcgtgggcatggcaaggcggtccctgaagtccgactgtactcgtccgccatcggggggttgctgttcgctgctggttgtttctgcttgtacgtttcgtgctcggcctcggcagatctgggactggttctgacgtcaggcctgcccctctttgaacagcggctggacggctcgtccctggattcactggttcgtgccttgcatctttattaccatcgcccagttgggaatctgtgagcgtggtttccttcgaataaaggttgatgtgcaagaactcacggttcgctatcgcagacacgatctatctcgcaacttacaactatctcggagatgtctatgacaagtactcggtcagtcaattctgcgcagatcgtaggcatgcatcgaactgaccccgatcgttcccatcaatatcgtagtcatcggcccaagctgctcaatcgcttttgcgaaacatcctgggtgccgtctttccctttttcggcaacgtgagtcctcggtcttgagtccgatttcgcaccgagccatagttgacggaagacgagcctactcccgcagataatgtacgacaagctcggcttcccctgggcctcgacactcgtcgggttcatcgccctggcgttcgccgtcgttccctggctgttgattcgatacggggagacgctccgaaagcggtcttccatcgccgtatccctggaattgctcgagggggacatcttaccggacgaggtcccagtccatggtgtgtagaagatcgtggtttggaaccctttgtatatatgtcgagtctggtagtatgaagcgtatagcatattccgtgtccccgttcattgtaccgttttcatttcgccggaccttcacgtacaggcatatagtcgtcgtgcccgacagcgtgttcaaatctccatcatacagtcttcatataagaacagaagcggtggccaggcccatcccgaatcccgacggtgaccaaggttgtcgggcgtttcgcaagaaggacctcgagggtaccagtcggccggtcgaccctaaatatgcatcgtcccagtttagctatgtatctttgtcccgttcggattcagagagcttactatgatagcctagccaaatagacaatccagagccagtccgaactccacgtcttgacgcagacttgctggagatgacgatgatcgaacgtttgaggatgtcaactcatgttcttgcttcttggtccgcctgcatctgggcttcatcccggatcattcacgggatttatacaatcacaacccaattcgacacttcaacggactagatttttgacatccatccacttgtaccatccagccgttctctcgagccagtgatcacagcatccatcccgccgttgacaatacaatcgagaagagaagacgggccgaccttcaatcggtacaacgacctaaactcgtgtcgtggctctgccatgtctgctcaagaatcggacgacccgacaaggcgatcaggtgctctcgaaccaccagaaggtctccctgtacgaagcaatagacctcctagacagaaagttggcaaggcatgcgagaattgtcgaagaaggtgggacgaacaatcgatctcgattttgaatgggtcggaaagctgattcgatattggctacatggcagacgagtcaaatgcgatggcctcaagccgttttgtgggacctgtagggcatacaatgcaagcatgaaatcccctctatgcctctcgcaataagaacgacgctgattgtcctgacgctaaactataggacgagtgtcagtggacggaccgcacggactatcgtaaaccgctctctagacaacaagtcgatgccctgcgctcccgcatcgccgatctcgagggactcttgcgaacacataacattgacccagttcaagagcctggaggaatgctggtcggagtacagaacgatattcctgtagagcgaacgatcagtgggggcgggccgagactaagcgtaagcgtcgggatggacggtgcagacgtcttgcaaagacccgaggaaaaggtcgaacatggagactggccgaacagccatctagtgagtgcaagatttgaattgctctagtatgaatcgacctcaatggatgcgtgttccaggtcgagaacgagacgggcgaatttcaggtctttggtccgacctcttctctgcgtcacctagtcgcctttcgccaatcctctatcgaacgagaacgccccgaagccggagaagcttcacgttctgctcctggtcaggcccgaacctcgtccgatggcaagtcagcctctttatggctgacaggggacgctacgccaagtcagattgcgggagagatcgatttccggcggtaccttccacgagacgtcgatatgaccaggcaagaacatgatcaggcgttggatcagttcttccattaccacgcatcctggggtatgtcgtcttaacgggtttatgtcgccaagccggtcttctgatatcgtccgatatcttccccccgcctcaacctcacaggcttacagacacaccccgttcactttcgcaacgacatgcagctagccctcttgatgacatctccacgcaatcgtcccgcccggacggcacattactcgcccatgttacacaacgccattctttcgatcggtcttcggttctcctcggatgacaaactgcgttcactcgaaacactgcaaaagttctcggacgaggccaagaagcacatgcgggtggaaggcatgaatccgagcgtggctacagtccaggcgctcgctcatctcgcttcgcatcataacctgatggccgagcacaaccttggatggcttcaaattggaatggccgtgcgatgcggattgacacgtgagtcggcccgagcgttccgggcagagaatcattgctgatttgggtacacgaattagtcggtctcaacgtcgaccctgcattactcgtacgaagtggaagattgaccttggctcaagcaagagatgtgagcctagaatctgcctgatatctgctcgtaaacccgcggctaacaagcctgccccctgccctctttctgcagcgaaatgtcacatactggatgacatttgtgcaagagggactatgggcgccctacatcggccgaccagtcaattggccggcacatacgtgggttcgaccaatggaggaaatgtagaaaccatggctctatctgactcgtttcttttcgcagtaccccgccaccggtcattgataccgacctcgatcagcttccatgggtcgccccgccaggcaaactcgccgtcgacagtcaaccgggaatgatcagttcggcctttgtggaaacggtcaaactcatggcgatcggggacaaaatcctgaacacattgtgagaagcttgcatcgacaaaatagggtgcgacttgctgaatttgcctacttgttcagatacggaatcacagccgatctggttgccctgagtcgatccggtgctatcagtgatatcaggtgtgtaagagggaccttcgactctcgaaacgggatctgacatttgagccctacatcacatagccttagtctcagtacctggttggaaggcttgccacccgctctcaaactgaacagtcactcgatacgaagcgctatgccacacatcttgacgatgcatatcagttgggcctcgttcatgatcatgctccacaagccattctaccgaccgctcgtcaatctacctaccaccggctcgggggagcaacccgcctcgaatcacaacgcgatgcttgccgtcaaggcgagtcgcttaagcaggtgttgatagctctcgctaatcttgggcctcacttatcagcaatgcgaccgagccgccgtgcaaatcgtttccctactccagacttggcacaaacttcacgacctccgtttcgcgccgcctccagtcctcgaatgctgctttacagctgggacgacacatctcctggcctacacctgcgcccggactcgacgaaaacaactagatgccctcgctcgagccaaagaatgcacgcggctcatggagatcatggcatcgagctggcctgcggcccaacagaaacgagaattgctccagcaattaactacacagtacaacctgcaagtggcaaacaacaactcgaacggggcactgcaagaggagcaaaacgacgatgcggcgagacctcgcgccgatccaccggtcgttgacctggccgaatcgtttggcatggtcaacccttatagcgatggagtcccggctcttcctccgactcccgctacccatcagcaccatcaatcccggccgctacatgcgcaacgaccaccgatacccagcttgcaatcttacgctttgcccaccgccagctttccgaccggctacactccaccgctccctactggattgagtgaggcaaatgcgtttcagtttggcgctcagccgaacccgacatatattcaagctcctcctggtctggcccggtggaacgtctcggccttggctcccccctctgcgccgatgtctaccccgccactcgattcttcattagcatgggcgccttctgccgaactcaactttgacctgaacgctttcaacggcgctgaatgggacgtcgacacactcgccatgttggaccctgctctctggctcgatgatgcgtcgtttcgaccaccgcctcctcatcaaatacctcaacagccaccatcacaacaggagcaaccatcaccacaacattcattaccggcgtaccaacaatatcgctaatcgaggaggcgtcccctgataaagtccgaggtatcgtcccggaagaaatccttgtatccagtgtcgtttgtggcggtccatctgaggatgtcccggatgattaccctttccgtttcttgcttgctggcccgggcattgtccctcctgtcgcgccttgctccactctcgacctcgtcgtcacccgcgcaagatcccaatagattccgtcggatcttggccgcttgaatgtcaaaagtggcgagatcgacttgggcgtggttcatatagtccgagggagaccatgttcggtcggttcctcgagatcatcgtcgggtgaggcccccaggtccacagttgacatatccagacgtgacaatagtactcaagctgtccacatcgtctggcgccccaagcagtcaatcatccggatcgatctcgtcatacggaagtaaaaaagccacaatggaccgaatgcaagcgagagacgcagagctgtcgatagacacgccaagcggatcggagaccacggcaccgaagcccaggaagacgcagagggtgacatggtaccagtggatgggtagaggcatgtacctcgacgtgaagcgccggataccctactttcgaggcgattggacggatgcctggaattaccgtgtcgtccctgcgacttttgtgagccggtttggcattccaaagtatctcaccggctcgctgatcccactcttaccgtccttgcatagatgatcttctttgtcaacgtatgctcatattttctgtcgtcagtagcgtaacctccgtgctcagttcagcccttcctgctttcgcgtccaggtactacccggcatcgcgtttgccctggatctagtggaagctacgggagaatcgggggtacaagaggttctactcgctaccgtaagactggtcctcgtcggacacacgcagtcctacaggatttctcatgacacgtcctgcagttcatcgccgcggccgcatcttcgctcctttcctgtcaacctcttctgatttctggagtgaccggcccaatcaccatcttcaacaagactatttacgacattttcgtccgcgatggcgcggcgacgccaggagatggattcaactacctccagttcgtaggatgggtatatatgtgggcggcaatcctgcattgggtctcggctttgttgaatggtgcgtagggcagagtcgtcggggtcgacccgaaggagacctaaaattgatttgatcgtcacagtttgcgcgcttttgaaatacgttaccaagtttccttgcgagactttcggtttctacgtcgccatggtgtatcgtaagccatgctcacctggctataccactccatgatctgacgcccagtcttcttcccatacttttcagttcaggtaagagcgcattccagataccgtgctcgtcgtaagcttgggctgatgctgatcaacctatatccagtacggaatccaggtcgtcacccggcagtttcatcaatcggaagatgacgccgcctttcttgggattctgtgagttgggctacgccatcgataggcagctctgagaccgtattgacaggccagccatatgcacagcctcgccgtcttaacgtgtatcatcccgcacctgtttgatttaatcttccattccccattcatgcaccgtcagcttcgacgcgtatgcgccgattatggaatgccagtgaccatcatcgccatatctgggtttgcctactggggtcggttcgctcgatatacggagacggccgagatgacggtgccgaccaaaggtgcttttacccctgcgatgggtcgaaactgggtcgtacctttttgggagctgccgggaaaatacgtcgggatagcgcttccctttgccataatcttgtggatcctcttcttgttcgagtaagcctctcggtctggtattgcgtctccaggcggacaactcaagactctgcatatgcttttcaactagtcataacgtttcggtatgtccatcccaccagacgacatccaaaggtgctcaatcttacgaagcgcgcttcattgcagtctctgatcgcgcaatcaacggagtttcctctcgtcaaacccgccggcttccactgggactttttcgtcctcggaatcacgaccatgatctcgggaatatttggaatcccggcgcccaacggtcagtccagcctgtcacgtcgtccctactgtctatctaatgccgaccggttccaaccaggtctcattccgcaagcgcccctccatactcagtccttgttaatctttgggtctggggatgctcctagatctgttgaggaccgcatggagatgggaccggtgatagctcacggaggcaagacgccgatcaactcgcctcatacctctagcattgacaaacgcaccccgaccgagatcaaacgcgacatcgaggcgcttgaggagcagctcaacgtggagaagcgggtcgcggtcgtcgagcagagggtctcggttctggttcaaggcttattctgtgagcatctttggggtagtatcaagcccttccaaactgattccgggtcacccataggcatcgtcatgatgacaggtcctttcgaaactctaatcggattcatccccaagggtgtcatcgcgggcctcttctggtaagggattgtagcggcatagctgcgtaagcggttgctctaacgcggctcctttgctctcaggtacatgggaacttcgtccatctttgcgaacggcatgacagaacatttcctctacctcatccgagacggccacctcacatcccccgcgcatccgttgcacggagttcgaaaatcccgcttggcgatttggctctgtttcgatttgatcggtttcgctgcgacatttgccattaccaacacggttgcttccatcggtcagtcgcaatccgtcatattggtcgcgatcgacgtgttctgatgatggtcaacgtattttcaggctttccgattgtgatcgccttgctgatcccgttccgaattctggtcgttcctcgactagggtggttcacggacgaagagctcgagatcttggatggtccggtagccagcgagtttacgatggagagcgtggattcgctgaaaatgtcgcagtaaagtggtccgcccattgcctcgttatcaaaccaactaccactgtatcataaagatcgtagcccgaagaaatttgcctttcagtaattggcgcgtttctcttagagagagcctattgaaaccactcccgcagtgtagtcttgcattatcgagactgggagccactgctcccgcaatctcggagtcttcgaggcgaagctatcgacccatcaaacccaatccctagcagacgttggaagttgtcttgcctgaactttcgtcgttaaaaatccaaaagcattcagtcgttcccgatcaggcttatcgcgatcgctagcagcttgtcaagagcctctcaaacgtttggacatgactcctctccgatgtttcagcggcttgagctaattcgaatttgcttccgcaattccatcgatcgtgtcacatggtcgatcgtgaacgcgggatcagcttgggtgcgacgaagggtgatgcacttttttcgtccatccgctcattcgtttgatggctgattcgacatgaacatccaccacagcttataaaaggctgcttccaaatggtccactagtaccttcatctccttccatcgcgaaacaccttgagcaaacggttggttgatgcgggaccgcctttagtagatcaagttaacggactcatagaggtaggtgaaacctgtgcaatggagctgcaagcatggtctattccagtcgtccagtcctttttcgatcaaaatgaatcggatttttacagactaattgtacacgacccgtcagctgatcccatcggcaccgtgctgggttacgacgccaacttgtgacattttggaaatctatcctactgcatccaagccaccggttggagatagcaagacgataaaccggctttaacgggactgtaagtcgcctctctaaacatgatagaccatgccacgggtcttcgttgtcaactgacgatctctttgggaactttccgttcacctgcaggcacctacctgtcacggcatcatctatacggcattgccaagttctggcagtggtcaacccagcacctgcgggattctcgatcaagatagtttcggcttccagcagtacagttgtccgtccagaacacggcacgactggacgaacgcggccgaaccattttcagcgagtccacctctatcccgttccgaacaagctacatgctcatccactgggtttccatctcaggcagatcgtacctccgtcgccgattatgagtgacatgaactcgacaccgagcatttccgagtccgtgatcgctttagaagacagatccatcgttgccgatgtcgacggcatcgaaggcagtgactcagccgagcccggaccccaaaagtgccgaggccaacttagttcttcttcattcagctccatacacgcttcccggcgccgatcagtccggacaattgctaccaaacgagatcatggaccttatctgctcgatcctggaaattgaaaacgatagagacacaggaagccttttctcacttctgctcctttgccaagctcaattcgatctggttgctgaacgtctctactggagcgtggaggccaagacaagcggtaaagtggaagaggtgaccaattttctatttcgagagagaactgggctgtcaagccggccaggtgggatacaccgtagcaatattggcagtttgggacttgaatcttcacggcttcgacgtcatgtcctcggatcctggccaggctttcgatcgattagttcagcgttttccatcgttgaaggtcgtcgaatggatttgctgcgattacttgtggaaggcaagaaggtcggtgaacagaacggggacggacacgcagatcaccatgaggcactgctacgagatcccaatcacgcaagaagttctcgacgacctctctgacctgacactggccttgtcagcacctctcacagtggattatagtttcagggagagacccaccgggaaccacctcgcccgacttgaacgtttgtccggatacttttctcaactacgatatctggagctggatggatattcaacgccttggcaaatcttcagacaccttcttgcgccaaccctcgtcgaatttgactgcgtcgaaacggatctccaatcgatcaacacgctccgggcctgtgacttgccgaatctccggaagctccgttggccacacacgaagccgaaaagagaagagcgaatacctggtaacagctgctttctaatcacaagcacaatgaccgaaagacgtaactgccttacgaataccatgacaacctcgactggtaaaccatctgccttacgcccgcttgtcatacttaaccctcggcctgtctgatttaccattctgatttcatataagatcatttccattcaacgagtccggtgatgcgatgtcgttcgcctggaggctatcgtcccaatggcgggggcggttgactgggtcgcccattccgataggataatatacttcggatctcaacacgacaccgcatttcccacgttcaagaggtcttcaataatcagtccccctgtcactaatacggcgatgaccagcgacgacgtcagcctaattcttggcggaattcatccgaaaattgttttggctacctcatgtctaccatctcgttagcctgtccggagtgagtctccgtgtcgatgccgatgtcttttccctatttgtgctgtcgtagggtccactatgatcaacatctacccccatgcacatcactgaccggaagatctcatgagcatgatctacgattcctgtctgcaacacgcgctttcagaataccttgtgctaggtcatcgacaatctgatccggtcgtcagaaatctctggtggatggccgagtgcgtgattcgacagggttccgatttcgtcaagcacatgctgtgtggcataacagacggactgagctagctttgacgcatcctactgtgatcgcatctggactcttgctgagcttcgcctgaagggatatctctcggctgtccgacattatcacactgcgctccatgcgtggtacgacaagcgggccccagctgcgacggatctatgcttctagcgcaacatcttcgaccttctacgtttggacaggaggctcaacatcctcaacccggtcttccaccgaaggtttatcgatatctggaaagaggtgatatcggtcgtgaagactcccccctcactcatgtcataccaagcgggagcgcccctatcggcagaagtccttttcgtctcgcctcgagctgtggacacgcgagtggctctacgagaccgagcgtctgttgcgtggagccggacccatccagtcaagattctgtaacgatcccgtccggactcgactggcgtgcttgattcaatctgacggtttcagcgcatctttgaggcaaagtacgggctgtcacgcaccggcgaagataacacgactgtttttatttcccccatatccggtcggcacttgaggatcgcaaccagacctagggagtcctctggtatgtagaccacttccctattcacgaaaacagcttatgtgtattcacatatgctcggtcactaccggtgttgcgatgccaagactagatgctttgaaatggaataaacttgtgtgcgtaatcagcgggtatgagtacatgtttttcctgggacgaagccggaactagtgatgtaaataaatggaaagcttaaatatttaccagcgatacatttgccctagtaacaatgaaatgcagcggagtttggtccaggcatttctcctcgatattcagaaacgatcaagccacgtcgttatcaggcgctttcaagttaatctgcgagaccacggcgaatgggtgactgggccacaatttggtagtcttggtcacggtaggcgctcccttccaaagagattccaggcggttcacagctctctgatagtcgctggagtcttcagtcgaagatttggtcgaggtgaagacccgagggggagccagccaggggtgtattaacagctctcttgcggtcggacgagcagcgggccgcaaggtgaagcactgggtcagaaaggccagggttttctcgacaagctctttgggcaggtgatgtttaagtttagaacgaagtctgtacccgctcttagagcgaagtccgtacccgctcagggagcggccgtattgcttcgctgcacgtcccactcaatgagcgtcacgcgacgtcagggttctgaaccccggacttactcatacaatggactatctcacgtgcctgtggaaagtcttcgacaaattgagggcagaagtctcctatctcgatgataaagtccctgatagcgccatcacggtcgtcgctcgagaaaaggtagtcctccagtatcatgtatgttgtctaccgccacgaaaacaaagaagataaacgcgcctgtactccacgtaacacgcgagctaccactcactgtcgttccgaaacaccatatgtcaatcggcttgccccaggcccctttgattacgatttctggagcatacatccgacggttcaaaacgacgtggttctcctgtttgtgttgccattgggctggttggtccatgtcaatttgcgttcgaccgtgtggctcggggaaaggactcacatctgccaaaatcggtcataacaataaccgcgttctcaaagaaccactcttgagcaacggcgttcttccacaacgacatccctatgggttgtatgaccgcagtcgaaaatgaacctgcaacactggccggatcccgccacatttcttcttgaatgtaatgttgcatgttaggcaagcggaacatgagattccccggcttgcaccctggtttgcaagcggtcatcagcgcacactaattcatcccattgttcagtctgaaacactgaccggcaaagatcaagttcatgtcctcgtgtagaaacgtcaaccctttcaacataccactcgccttcttcttgatgaatgcgaggggcaaatccttgtgttccgctctcagaagctggaccaggccctccaaactgattgttaaaggttccatgacgaacgccgcatgatgttgacgactgaaggggtgctgaaggacgatgtcctcgatgaagccgatcaagtgctccaatcccggcgaacacaaggcgggttgttctttcctccacgagattttgcggagtacagttaattcggtgacatgttctaggttccgatgcaaaatcttcaacgcgacaaccatctgcatactgaaagcttcgtcgatgttacgagttatagctccatgcctgcaatcatttgatagagactaacgactcaccgcatatcccgaactaaccaggcgttcgaattgtttcccaatcccaatttcctcatgatgatgtacctctctgtctcgtcctcctcgtcctcctcgaggagttcgaaaacgatattaatccgttctccgattcttcccgtgtaacaatagcccttgtaaaccctctctcggcctgcactgttgatgtcaaggtccaagtggcccatgaaacgtccgttattccacatgccgggacacatttcgtcaaattggacctagcgacgtcggtttgatgttctgaaggacgttgttgtgcgctggtttgtcccggatatgtatcgttgcctgagccatgaaatcttcactcaatggttagacttatatgctgatggtgccatgctgaccaactgtcacaagagtcagctcgctggactgcgtaatctagcaactcgcgattcgggctgaatgacgctgtctcgatggctgcgaattcagtgaataggctcgattgggcaaatatgcgccttgacatcatcggcggacctcatgtcgtctggccaaaagcttgtgtcatcaggacggacaccctcaactccgtttagagatggcagacggctctagaatatgactaccggctctcaaccgcgttcccctctcgtccgcagctgaattcgctaccaccgcgcttacgccccttaccttcctgcgcgccagtccgaatcgcaattcgatttcctatcgtcgacagatcccgcctgcttgtcatcccttccaccatctcgagtaggtccaagccagcttccatgcaatgtacctcgttcgccatctcgaggtgccagtcatacatggtcccgttgacgaatgatacgacaaattgtatttgccaccatcgaacgacgcgcttgaggtcgcgcgaaccgtccgacgattagcctacacgtatataactttcaagtctggattgctattgaactccatctactttcactccaacctctctcttcatcgtttacttgctgaactttttacccctatcctaagcactcgcaaagacacaacacacattcacacacacaaacatgtcttacgcggctaccaccatctcctcagctctcaaagctgcctcggtcaggaaggctcgattcgctactgctgctgctgctgctgctaccgtcgcagtccccgcggttcagaccaggacccgacacaggccggcgatggcgatgaaggtaaccacccccaggactactgatgcatcttctgtttctactgtttcttctaggttgcgctcgatgtcgactcggactcgaccgacgcctcgacgaccgacaagaagagacgctcgaccagggcaagcgattcaagatcttcactcctgaagaacaacgctggacttctatccccagccaccgcacagccaagcctgtcaagagcgctcttcgagtcaagactagcccttatgccagtgtaagtcgacgtccggcccgaatcgcttttcccggcgacgtttcccgtttgttcgaccgctgatcgtcgtccatctacccttccagaccgatattcgagctacaagcttcttgacattgcatgttcagatggcaaccgagatcaacctgactctgtgtactctcgagtccataaatggggagcgcaagtgtttgggactcagccccatcctggagaagcgactgccagtcagctggaggctccgtacccacagcaagatccggatcgaggaaggtaacaaccagtaccgtactatcccatccaagcaagtgcatctcctgcttaaccctcgcatctctagtccaatcgctgacgcgtccgctctctcatgtagcatcaaacggtaccagatcaccgacgaggatctcagcgttcgcgagaaggaggtagcggaactcgccgccctgggcgtttacgacaccggcgaggacgacgaggaagagaccgacgaattcgaccaagtcgacgaagaggacgtcaccgacgtctacgaacatgcgaccaacgtgatcgagaccgaagaacccagtaccgacaacgtcgagatctcttcgcaagcctctcaggtcgccactcccatcggacctttttgtcctcccgcccctcgacgagaacgaaggcttcgtaggccctcttttatgagcgattgcgacgtggccatccctgctcccaagctcttgttccccgctttggaaacggtccaggagcaatccgaggaggaagagaacgtcgagtagaagcttcacacgtaagtccagcccggatcgactcgtccgacctcgatgttgacatatgctctcattcacgacgtgcagcatcaacatctccggctctctcactctccggctctcgtactcaggtgatccctcaaggtgagcctcgatctgcgagcaatcgtcgcgacttcgacaccgttaccgtgaaacacacccaccgccttcggacgatcgataatggttcggttagatgacttgctggagggttttaccgtgcacacctattagccgcggcgccgctccgttgagaggcgaacctagtatatccaggtacaagtcacactgggtctgagatcgtctgtaggtcggtgagtgcggcttgcggtgagggttttggtgttgcgccgatcaacgacaggccgaggctttccgacaagggtgatccgacgtatagagtcgacatcgccgtcggcactattgtcgacaaacaacggcgaagctactcgaccatggctctctcgcaacaaatcagcaaagcatcatctcatggttccatacacattgaaggaccaccaaccgggaggatgactacatatacacgaagtcctctctcagctatataccgtatgcttggcttgatctgtttcttggattcgttacgtttgtagggtcccggttttccccactggggtttttccaccgggaccgcgtttataattctcggtatcgttctctcgtctgcttgtacgtgttataattctcggcttcttgtgatcgtttatgattcttggatcgtgtcatatcttataattctcgggtctgcctatcatctccgatgcttctgcctctcgctcccgatcataaacacttgatctttgattgacaaccgcacattatgatgatctttttacgctcgtgggttgacagcgacttggtcccccgctagacgtccatgatggtaccattgtaatttcctcctggacactggaatccgagatctgggttggactcggccccaacgttgatgcagatgacggccggttccaacaagggttgagggaagacctggatacccttgaatttgaacccgctgcatgtcgtcgcattgctgcattccaggacgattgaatgggttccagggttctccctctccgagatcgaagcgtcataccagcatgggtcggacacgcaggacctgtgagtacatattggttcagtctcggttcgcctcggtcacacgcctgctccggcttacctgtcccccgggttgtaatagttgatgttcccctcgaaccctcgccaagtgctatgggtgagtcgagtcagcacacgaacgcgtgctggtgtggcactctgcaaactcacatgtcgcggaggatcacgctcgaattgtctggacggccagagactgcacctgattcgatctgagactgagcggatccctggttgtagtaagtctgggtgacaaagatggggaagctgtgtgtgcgagggtgtcagataaaagtcactttttctggcgtatcggtcgactcacgtcacattgttgagcctaaaattttcgtaagtcacgttcgacaccaatccttgtccgccgatccaggacttgatacggctggcataaaccgctccgtccatctggatgttccggattgtgacctgcgcggccggaaagcgaaaccagcgtcagctctattcgaccgcggagtggacggaaacctgaccggacctacattggagacgctcgcgaacaatccctggttctgtcccaacgaaccgatactcattccgtgcgagtgatgtccgacgaatccgttttgaacaaggacgttggcggcgccactctgaatcgccacggcatcgtcaccgttcgagatggtgaaaccgtcgatcacgacgccgtttgccctgtagacatggcgtccgatacggcagtcagccgtgatggtccgagtaaatgtaaaggctggcactcacttgatatcgaatccgtccgtgttaaaagggaacccaccgctcgtgaaagcgtcgatgatggtattcttgatcgtaaagttggtaccgctgatcgccatgttcctatagaaagcctcgtctggtctcagctgatggaacctgatcgttctggtcatggttgtggacttgccatgcgatcggtttcctgaccttccacccgtcgatgtgagcattgtcgatttcaaagttggccaggtggggacgaccgaggagtccggtgcctgtagggttctcggcgttcttgtcccaccacgcctggccataagctggaatgcagcgaagcgatgaaatgtttcaacagctggcgaacagggaggctacaaggcggctctgacataccataaatccatccagccgagacgtttttgctaccgtaccacgccacatcgtctccctggagcgacatccaaacgccagacagccaagcttctccagtggcattgactgtggcattttcgaggacttaggtcaggatcgagtctcgcattagacgccggaatccgggggagaactcgccgatggcctgaacggtcgggatatcctggggcaagtgcaggttgccgtccaagacgatgtcgacgtttgacaaatttgtagcccggaagggtgtcatgacgtagctacgagaggaagtgttcagccactgatgccccactctagtagagcggagagctgtgtccaactcactagtcgacacccttttcgaacacgacggtcccatccttggcgcaatctttgagtgccttggtgatggcgggcgagtcgtccgtggcgttggatcctcccgatgtgaccacacaggtcttgctcttgctcgcgggcttcccatcgttctctctcgagactagcgaggggaacgccgtggccgtagcgagcagagggaggagagcggtgagagttttgatttgcatattggagagttccgacttgtgtgcatgatgagaggtgagtcgacgttgtagcgagaggagcgccgtttctcttcgacctttatactcgatcgccggaatggcacaaagaccggttgagtgagattctccttgttgcggcgagagagaggtcaccacgggtccccaccccggaccgcgtagaacgagctaacgatacgagtcgacgggaggagcacgccgtcagttcacactaggctcaatcggagtagctcctggtcaaatgaccaaatgacactggcttatggcccatgacgaccgtcgaacgacattgagcgaccgggaatttcgccaacttggtgcgcgctaaaaacatgctccggctcggtttcaaccggtcccggcccggggctcctatggtcgaaatcgatgaacaacctcatgggcacgtctcgaaagtcggcatgtctcgagccgcctgcggaatttcaggccacaagttggtaccgcgtgacttaaagtttgacctgcggagttatgtatggaatatcttgtgcgccggcagattcagcgcgaaacgcggcgactacgcgataactcgataatcgtcatcatcatcatcatcgtcgtcggacatgtcgaccgccgccttacaccaagctcgcatctcgaggctcaccgctatcgactcgtgtcaccttgcgctggcacacacacctagacgatctgcaacggatccttgtccttttcgctaacgaccacctcccaccctcgctcctctgcctgtgcgttcaattcgctctcgagcttgtccttgaggatggccttgaggaagcctcgctcagtgttggtatggtggcacaatacgacgtgattccccgcctgagtcgtcgccagagcttgatgctggtggttcatcgagagatccatcaaaggtcgcggagatcagtgggacgaacggtttgctatcggagctgtcacgagcagcctcgttgctgtcgactcacgtggctcatctcgcccgtccagtagagatccgccttgacgttcttgaacattgatcctccggacccggcacagatggcgaccgtgttgatcaccttgctctcggccggcgcaccgtattgcactgtttcctcgtgacccaccaacgtcagcccaactaggtcctccccaaacgcccagccccaatgctcacctcgttccattcccaacaactttttgatcgacccgaccgcctcctccgcatcgacgccttgtttgagggcgacgaacctccccattccggcctcttcgaaccctgccagatgagcgggtacgctcgaggtgtctttgaatttcggttcgagagatttcgaggatttcaaattggtcccgaaagccgtggtcaacctggacgtgtcaacgtgacgtgacgtgatgagcagaatgtattagcctcgaacgactcgatcgggtcaaccagacctgcagctagaacaagaacaagacggccacgacgacgacgacgacgacgacgacgacagcgagacccggggcactgaccaagtgttgatcccaccatcgatcgcgtccaagctggtatgcggactaaagaccgagatcccctttgccgagagtttgagcaacgaggcttggagggtgtctgacagtttcatgctcctatcccccgcggcgtcgatgtcgatgtcgatggatctccctatcagctcagctcggtctaggggaggtacccggggcttatgggactgacttgagaccggaaaagatctggacgacgtcggaatgggaagcgtaaatcatcgcgtcagctctcggtatggcgatgagacgggcctttgctgacgtaccggaggatgataggcgacgacgagggaacaatcggggaggtccagtgcttcgttgcatacttccgtggtcaggctgtgtttgcaatcgatcgatcgtcattcaaacacgtcgagctggtgatgggtttggaaagtaggactgactcgatggtgagcaagactttacgtgcgttgctcttcgggtagggtgcctctagaggaacgacagacgatagacgacgttgagccgagtcgatgtgatcaacagaaacctccctctcggactaaccgatcatgactccgacctaggtaagacgagatgatcgttagttatgtctttgtgagtgagaccgacgacctgcctatcacattcgtcatcgaatcgacgtacattgtcccaactgttgtccgccagttcgagcggtgcgatctttttccaagcggtttgcaacacggcaatgggagttttcgatgctacggcggctgacatggtggtctatgtgcttgtaatgtaattgtagtcttgtctacagtcacaatcagagtgagcggtagagtataagacgatgatacgatgttgatcgaatctcactttcaactttcgcgagttggtggaaatttcggaagcaaaatgttcattttagtggaagttggaacagatatcgaactaaataacaccatagattgtacaagttgtcacctcattctcttgaccagctccagccccagcccatcctgcatctagacaatctcacgatgaacggacagattcatgacgttcgcaacgtcttgatccctctgatctcggccagcgccgggttcctcgctgcctacctctggctcacgaatcgacccgtaaagacgaccgtgtcccccaagaccaccaccaccaccaccccggccagcaacagcgcacccacactctccacacctgctaaggaagctcccgtcgacacggacgagaccgactacactaccgattcggacgaagagatcaccgaagactatgcgcaacggctacagaacgccaaaccgccttcatcccgggaagaatgcaagctcgtgctcgtcgtcaaccaggaactatccatgaccaagggcaaaatcgcagctcaatgcgggtgagtgacgagcatattcccgattaatgtcaactgggagaggtccgtcttaacgtcggtatcgatagacacgccacgctggcttgttacaagacgttgcaaaagacgaatcccaaggtgagcactgcgcgttccagctttccctttgtaccttcgacgctcaaaatacatttacacagctgttacaacactgggaacgaatcgggtaggtctcggatcggtttttcgatgcctcgacctgacccgccgtgacgacgacactgacccgccccgccccgcatagtcaagccaagatcgccgtcaaagcgcaatccactgcagagatcctcgaactccaaagtcgagcccgcgggttaaacctctgtgcacaggtgatcagcgatgctggacggacgcagatcgctgcggggagcaagacggtgttgggtatcggaccgtaagtcctcctactaggcagcgaagcgcaagtcggctgactaggtcgtttaatgatgacttgatagaggtccggtcaagctgatcaaccaggtgacgggacatctcaaattgttgtagccttgcaaggtgttctagccttggattacgagtcgaatacaacatcgttggcttcgcttcgtatgggtctttacattcagcggtcgagccggggttatacaatcgagacgctaggtggtttaggtcggtgcagatacggacgaatcaagagatctggggggatggtgtctcgcatgcttttcctcaagaatctcctgggcacatcgaccccgactctgacgacgtcctccgacacacctcgtctacccgaatcttctcctcttccgtcttctcgtctgccctggcattaaacccaccgccgagtccgatgacggtcatcaacaaggcgaacacgccgaaaaacctcatgaccccgctatccttcctaatctcctccccgccatcgtcccccaatccactacccgaacctcctgacgcgccgggctggccctgcatcgatcctcgttgaccaaagggatacctgtgcaagttcggatgatgactcgccgatccgaactgtggcggtggagctcccctcctccctgccatccctcccgtcctctccgcgaacccgtaatccatccaaggtccttgcggacgagattgggtggaagattggccgtacggggatgatcccgaattggcccacgctcgatgagggcccgtagcaccttgtcgttgatgtcgcaggtaaggagaatgtggcgagtaggccggaccggaagagaccccggcggatgaacggggttgcatcgagatgtcgtattgccgtctgcatcccgatccaatcaaagcgttagcacgcctcgtatgtctgtaaaacgtggcgacaagagcccaggggtcgactcggggacttgccgtttcgaatcgtctcccagcacgctgtacgcttccgtcagcttttcgaactgtgccctgtttcctccgacgacatccgggtgagcccttttcgacaactatgaacgacggcgatgacgacgaacacccccgagtatcagccgtcattgttcgccgagccgcagacgacgctcgggactgacctcgtaaaacttgttcttaatctcccgcttcgaactcgtccgcgcgacttgcaagacatcatagtggttctgtcgatcgtgcaccctcgcccgcagagaaccggtcgagtggaggaatcgtcttgatgatgtggacatgggtgccgtacctctagcaaattcgctcaacattattattgttgagatgtgtgttgctcttgatttggcgggggaacggtcgtgcgatgcgagcttgtgatccgatattcgtagcgatcggaatctggcggcgctttgttggcagtagaattgggtggtatattccctctacgcagtccgagtagaaaggcttgtgaaacggttgttgcttgccagtcgcacaatcaccagagtaatcgttatcacgacttgaccttgtccgatcccggttcgatcgagaaagatgacgacacgatcgacctcgaattgggaaaaatacgcgtcgctacgagatggaatcgtctcggaaattgggaaataagctgaatttgtagagaaattgagaaatggtaaaataacaccatgaataaggtatcccatagttagaaccaaattttggtacatcctccaaccacttcccttgtaggtaatgacctcaatcatcttcgcttgatttgttatatggtagacatgtagacaaggctaatctcacaggctagatatggctgtctgagatcctggttctgctcgagaatagtagacctgttagcaagcctttccttttgcagtaaagtgcacgtcacaacgcaacgttgagatgagaaaactgctcgtcacgatgatacaaccttgccatcaggttgatactgatatcctatgctggcccccataccacgtatcaggcaatacatttcaaaacttcatcaaaatgagtatttccggaagcaaaattagcgattccgcccttctcgtccggcttgactttcggtcgaaaccgagatgcagagtaggaacatgatctcgaagtcgtcatggtgatagcgatctctggttagcacctgattccagtcatccgtctacccgcccgttcgaaataacccactacgtcgacctagcaccatgtccgctgacaagaaagtaggagcatgtctgaaagccgtacaagaggtgagccgtctcacccggggatcttcaataaccgggtcgacctgacgacaaggctgggtctattcgtttgtcacaggcgtggaacgcttcaatgactgcgcaaggcaagtttcgaagtcttccacagctcgaatacgctgaatcgtatgctaaccctgatgatgtgctcggtcgtgctcgggaacaggccatgattggcgtgtcttgcggaatgtaagcttcagctcggaagctggaccagcatcggcagccgagctgaccttcacgcatctgcagctcagattggttcaagcccgaccgaactttctgcaagcaaagctgacgattgaaaaggagcacctcaacaagttcaaggtcggttcgttagcgacacgctctaacatgacgagatgaccgagacgttattgaaccgagatagaccttgcacggcggtgtcatcatgtcggtcagtagctacgcctcagctcccatgctggagcgagcggaactcattggatccctttcgtatacattacagttgaccgactcgatggcatccctggcgctgactacgtcgggtcttcctcctccaaccggggtgagcgtcaacatctctaccgagtttctccgtccaggcgggaccgagggggatgagattgtgctcgaatccgaggttctcaagctaggtccgtcgagttctcatctcatgcctgccaatgacagtgaacggtcttgctgatgtctaatgttctgggaaactgtccttagggaaacaactggcgacaacgaggataaatttctactcgagcgagaactctcctcacggtcggaaactgctcgcgtatgggagtcataccaaggccgtcaaggatgcttggaaagctgccggaggagtaagtcagggttgtcaaccagtatcgctgacgactcggaggagtctgctaactcctcgtgactttgtgatcgttgcatcgtagaaactcgtcaagtattcggaggacggcgagaatgtcgtcgagtagaccttgcacgtgccctcatgtatccgatttgacacggaatgcataaatagacgacatccgatcactctacaacctcgaatttggccattttgagcacatcctcgggggtgacgtgatacatctcgtcgatgaacgccgacctaaaggtatttggtcctcgaacgtcatccctttcccctgccttttgcccggcgatggtatacaccaggatccctgccagcaccccgagtaacatgtctcctttgacgagctgcgtcgatgtcgtcccggcgattttggcggcaccgcaaaagacggtcacggccgtgcctacagtcggggcgcgcagcatcagtacgactttggacggacggaaaaggagcgcgatccgacttgccagtcatacatccggaccccgtgatacagcccatctacacgtgatctagatcagctcggccgactggtagcaggcggagttcgtggcgactcacccagtgatgaccgttcgacgccctcaacaccgtctctccgtccgaaatgtaatcgtccactccagtcatggcaacgatggcacctaggtcgtgtttctttcatgttagcacgagaaacgactaatcggcgtcatacgagtcgaaacagaactgacgcttctttcgtgcgagcatcttgaccacattcgccgggtcagagaatcccggtcctaccgaatcgactcccttgctggcgacctacggtaaaacagccgtcaacgctcggaactttagagtgcgaacctgctttcgtgtggccaaaacccacctcgactgaatcagccagagctccaatctcccccgcattccccttgatcactgttggctgccaggcgtccagcaattctgtacagaccccctgaactcgtcagactcattgtgaacctgtcgtaccggctgtcgacctaccctttgcggtctctcgacggtaagacgtggctcccacggctaccggatcgaaaatgagcggtttcaggttcttgttcgcctcttgtcctgcgacgatcattccttgcttgtcagagatggtcctgatcagccaacatcggatcagctcatgtatcgcatccgagcggaaacggcaggccctacccaaagttgatcaagagggcgtctaagatcttgctcagatccttgacgtcgagcggatgggtggccatgatcggactgcctcccagggccaacgtcgcgttcgccgagtcgttggctacgaccgtgttggtcatctacagaagcgagagggaccacctcagtatcagcacgatgcgtcgcctattccccaagaaaaagactcgcctgatgagccagaggcgtcttctccttgacgatcttcatcaatctgaccacgccctccaaaaagtcctccttagtcctcttcttgtccgatacggcgaacactgcgaatcgaccgttgttcacctcttctttacccctcttgacggcttccgccagatgtcgagccgactctgcggggttggtggaggagacgatgtcggagatgacggcgatcccatcgagcgagcgcatatgtttcggagatcgggaagcgtgcagtagttgaggcacattgggcaggtggacaccgcctatctcgtatggacacccccagcggcgtgatcagcgagacgttgcaagcaggcatgtgagacagggttcgactcgcctatcgctacgctcttgattgatctgttgggactttgcgccaggacgtccaggatttcccctacacctgctgggccgagcatgatcttgcccgatacgtccttgctcgtcgtctgccagaccgctccgatcccgacatagtccaccagaccgtcatcgacggccttttgtgcctctcggacgttccccacggataatcccaggatggagccaggaggtaagaggtccctcgcgatccgggatgggaggtctgattgtcctacgtgcagaccggcggcttggacggcgaggcagatgtctagccggtcgttgatgatgaggggtacattgtacttgtcagtgatctcttttgacctgcgtgcgatctcatagaactgtagaggtgtgataagagccacgtgtcaaaacctggtggtcgagtctcaaggcaaggggtgagtgcttacttcgccggtatcgacctttttctcgcgaacttgaacgactgtgactccgcctcgaagtgactacgagatggatgtatagaaataagccgcgtccaaagtgctgaataaaccttcctggaacaggtcatttacctcttccaggctctcgtagtagtcctgctcgatcgatccgccggacagcaagtcagctaagctcttcccgacaacatcctctttgattcgtcatatctcgacccgttctgaccttgcccggtggtaacagctcacgtccagtcacgaggtagacagaatagtcgatcgagtcggccgtgaatcgaggtgtcatgatgacggtgtgacacttcgagttggtgttggtgtctacttcgaggttgaagtttgaatccaatcgattctgaaatggcggagagatccagcttcaacttatccgttccgtcccagccgtacacggaaagcgaacgaacggaaatcggaagcatattcaaatgaacaagaactagattatatcatctgtgacaacaactctcagggacgaaggggtccaagaagtagtcttttcataatggcgtccaataaggacgaggtagtcggaccttgaaaggctcctcccgagcggagtgttaaagagccagaatgtggtgtcacagggccaacacaatttcaacaaccaggtcactcagggccagaataactattaattttaccaagattcttggagtcctatgaagaagggtttcaagcgtgcactttcgttgtcacggtagacggtgggacatccacagctgagcagcttgttgtcaagcagatggaaccacctcctggtggcggactaatgtcaggcgagtcgaggtggacgtcttgttgtcgcttgcaagatctactgctcgaagcatcccgagtacaatcaaagcagcactgttgccaaatctgcaactgggtaacgatattcacacagcacctacccgtatcatctgccttgaaaacactctagctggcaccgcatttcctcaggacaaaaacatgaagatcttgcgggaagcagccaagcacgacatcagggttctctcacatgagcaaatcggtgtgatgttgtttgcattcatcatgccaagacgaggacagtttctccagtctggacaagatcttttaagaagcgcctccccacaccaaataacctcctccatgatcaggacgccccagaaccaaacgagatgttgtctagaggatgctatatttatgggccaggctgcatctgatatgttggatgattcaccttgccattgaagagcaagtcgagttgacgtctctccgagcaatgatgctttccatcgacataaagagaaagcgaagagtcagtgcaatatgtagtgaagatggggtgaggtagaagcaaagaaagcttataacccggcggtcgcgaagaccgtagacgtgaaggttcgtggtcgatggatgccatgatgaaccagggcatgccacggccccttcagtagaccaggttcgctgtcgctgcggagctggcacagggcgggagataatctgtctcgggctcttcacaatgatatgactatggacgtatcgtaggatgatctaggctgtgagctagtctctcgtgtacccatcacgaacggtatcacacccggaatgatcacccggctggtcccgcataaacatgtcatcataatccgtacggcttacaaaagcgattcgttgcagactgacttgtcccgtcatgccgtcgccttgtcttcaaacattggatcctcgacgagctccccacagacgatgtacttgttgacgaaatgaccatgccacgattgcatattgtcgctatcgatcgaaagcttctcgtcagcctccggttcgagcgtaccaagttgttcgggtccttcacgcaaagatcgaaactcacatctcgtccatggtaagcccatccagcttgttcaagggctgatcgagcggtgtcagcatgtcttcgtcgaaagactgcttggccatccctagggaagcgtctcttcccgcaaagttgccgtatggaccgtctgtcatgagcaagacgataggcctttcagcctcagtcgtttgggattgcacgatgatcacgccgacttacccggtccatagaacccagccccggccgtgacgtcaaacaccgttctctcgagtctgacctccctccaacctcgctcctgcgtctcgtccttggccttcatcctcctctgaatcgctagtaacaacctccctcccccatctgtgcgtttcccatcaaacttggccagctccttgggcgtgtatttcttgtagaccaaacactgcggatgtttctccggcgtggcttgatacccctcttttgaacgctgtgtggatgaccgtggtcgcagggccgggcggacgagtgcgatgacgaggtagatgaggatcgagacgagtccgatgtcgacgaggttgatctcgcgaacgggcgacatggcgatggctagctcggctggaggttgaggttagactattcttgacctatgatctagctgtagtctatgagctggtagaagagcatcgagtgacccaagcttcgatacgatcatctataatgaggagttataaaagctcaaggaagccccgagttcgcgctattcgaagatgacgacttgggtaagcagcaggtcaggtcgtcaacgagatttagctaaactacctctcaactattcgggttccacagatctacagacacctccccacctctcaatccgtaacctcaatcttgcagtttcgcaccaagagcacatcatcctacaggcttgttctcctacaccaccggacctcgaaaatacacgatggccggcgcagcgatggaacaccagatctccgagatactgcgatcgaagctcgacatccaggacctcgtacgtagagcgtcaagtggtccttgtctcgggagagtcttgacctgatgcctttgaacaatctgtttaggaaatcgtcgacatctcggcgaattgcgggacgtcgttctcgatcgtggtggtatctccggatttccagggaaaaggcaaacttgcgagacataaaatgggtgagcatgggcgatccatctcgatgcagaggtacagagggggcgctcatgcattgtcttgcacctctagtcaactctctgctagcagaacagattgctaccctacacgcattttcccaggtgggtcggccgacttgctatagcagcgcccggatcacgctccggctaacctctcatatcgattccaaagaaaccgcttacaccaactgaatgggaaaaggagaaggaaaagcgagcagcggctaccaaggtgtgagcatattcggaaggacggattggtggtctagctaccagggagactgcagcacgattgtaagtctcggctttggaatggtcctcgagaacctcgtcaatgaccgagatgctgaccttgccgtatgctctcaacatagagacttagatgtatcatataccacccgcttgactggagtgtctcatgcattgcaacatcacgatgactcgtcagatcaagacctctccgaggccatgtcaatcgatcccggcgcacgattcggcgtcgctgcagccattggatcgacgagagcaagggatcctctcttccaccgatgtgactctccaaccccgctgacggagggtatgatagctcggcatgcggccgatcgagacggacactcgtcttcatctattgctcagcgaagggagcgactagggctctgccgaaatggagcgggcgcatgcgctcacttgaaagctggacagtgcatcttgcacgcacgactgtctcgacaccgttaccgcatcgagatcatatcgtacaactaacgagacacattcccaaacgcacaatcaagccggttcagctgtagtgagaaaggggtcgagctacgacaaagacgtggagcaacgacaaagagggtccgagaagcaactgcaacgggaaagagatataagccgcgactcgaactccctttccaagtttgttcgttctctttctgcaaagtacgatccggccggtacctgtagacgaggtcgtgtcgagtcagcggtgagagatctcacagatacgttctggagttggttcgcggtcagcgcagcgacgagtgattcgatttatcggaacgtgttcgagcgatcgcaagtcatctctacacaggtcgactgccatctcgatccacgtccgctcaatcgttcggaccgagatcgcaccacttggtcgcacgcaagtctggccacatccctgcgatcgccccctgccaaggatggctcagcgacgcatctcttcattacgtcaatattcatcgattcgcatagtagtattaacaatcgcccatctagatcacaacgagcagtttcggtttcgtcggtggtggtttttggttgtagttgatacaagtttgccgagggacgtcgacgttcccgtctcgtcctggtcccggcatcggcgatctcccgcagggtgtagtcgcatggaaccgattttgtgcatgttcatgtcgtcgtcgttctccgtttgcatgtttttttctctctcgcacgttcgcctctcctcttgcttgttgaaaatcgcgctgcagtcgtgccggctctgtgacctaggtcaaggccgagacgacggttaaccaggcccagaggatcccaccggtcatgatcggtagggtcatattgtcatccaacccgaggtctatccagcagcatatcagcggatgacgatcgagcgatttgacggggagacgactcaccaagagcctcgacgatggctcccgatacgccgagtacgagcgccgtcgcccacctaccccacgaagtcgcccgcaagaacgtccatcccgccatctttccccccatccagacgctcaggtccacgtcaccgccccacaactctccccatcctccatcctgccgtttcccttcccccgcatgccagtacatcaacccgatcccacacccggtgatgacggcagcgaggaacccggcgagggatttgcgtttagcgaatgggatgctggtgagtgggaggtgagcgggcaaggggggtgagatgggcgaaaagagacgtccgatggtgctcgccgccgtgtccgaccatgatagcctagacgccatggacgtcgacagtggggtggtatcgtgtcagctcgaattcgtctctctctatcgacctggtggacccacgtgaggatgctgacgacggcgacgtccctaggatacacccctacggtgaccaaacaccctacgaggtaccaaatgacgccgttccagcccttttcctcggactgcctcatcagcggtccgcacacctggatgtagaggaggttgaacttgcgagagttgaaacgcatgatatcggtcgaggtgatgatgacgagggcggtgaagagggagatgaggagtgggcggatagagtgtgggttctgagctcgaaggtagaggaccaagaagcctgtcgatggggtcgacatccatgtccatgtcagtcgggatgcgaggtacgaggtgacgtgcaggacgacgacaacgacgtgagacgtacctatactcgcatgcagtgtctttctagggatctcccagtccgtctttttcggtacgacttctttcaccgcgtggccgttcccgtcggtacttggcatcctgacgactctcaacgagtttctccttcgggcctttttcaagggcggggtcgagtttctcgacgatgtcgttgatatcgcggcggtatcgacgactggggtgttggatttgtcggtcgagagagcctcatcgtgcttgaggattgcagcaggaccaccactcccgttgagattcatttttcctctctttttgcctgattggggggtgggcatgacgatcccgttcgcccgggggtctccattgaccttgtcgacgtggttgacggtacccgcggtgactttcgtcgtgttcccattcgacctgacctcgtcctgttgatgctgacgatacttgggttgaccgtgaccgtcgttgttgctgttattactgatcttgtgatcgttgaggacggcgaacctgttggccgtgctgaatcccgcgttggacgacatgctaggaggatggtgatatcctgccccttttggcgatattttcctggtcaacgaatatgacgacgagttagaatacgttgctctcagagtgtgtcagacgtcgttgtggttgtgggtgtgtgtgtatatcttgacaactatatgtttgttgaattgataaagttgatgtcgactcttggtcgtcgtcatcgcgccagaggagggaaggagtcggggaaaatatggaattcaattcacaatcatcaccatgcaccatgttcatgttcacatcgttgtcgtccaccactaccaccaccacacaccagtacacctagccgagactcgacatgccacccattcgaacgaccaactgtcaaatctgccaatcggccgtccaaaagtacaaatgtccgagctgcagcgtgccctagtcagtaacccccccggtgctcgtattttggcgttatcaaccgggtctctcgatctgaacatatggccatcgggtatcgttttattcgacgtcaaatgatagctgttcggtagcatgttacaaagtgcataaaggtgagtcgtattcccccgctttgatgtgagggataatagttaggcggggggattcaaggctgatcaggaaccatctcatctcatctcctcgcgctctcctgtcaacgctctgatgatctcgtctggaactcctcgttttgcgaatggaacaccaaacgccgactctgtgccttctgaatatgcagagagggcacatggagctggaccatcttcatcctcgtcttcatcgtcgacgagattaggaccgggttcatccacgtcgaccccgacgtcgatcgcgggaacaggaccacccccagatcctctccctctcccgctcatacgtctacctggccgtatcgattctctcgaccccaaccctctggccgtaccagcatcctccagctcctgcccgacgtcgaacacgaacacgaacacgaactccacgccagcgctgacctcgacctcaacctcagcgcacccgctgagacccctgacatccctacgctggcctacagctccggacgagaccgtcttcctagatcctctctcagcggaccaagtcaggcctttgagactcggatgggtgggcgctggcgctgaggctgcaggacacggggttgcggctggcgctggcgctggcgctggggctgaagggtacagcgcgttggccatgtccccggaattgaggaggttgtttggacctgctcctggattagttcctgcctcgacgtcgacatcgacatcggggatggtaacagcgagcacctcgacaccgacgaccaagacggcatcgacatcgacgacgacgacgggcaagcacaatcataaatcgacgggtacgatgaaggatacgacattgacgaccatggcgacggcaacgaagcaccccctacttacaaccggacctgacctgcggacgacactccgacacctacgttcttaccctcggtacgctaggaaagcccacctggcgcgtctactcgggttcgagggtgacctcgccgtcgacgatctaggtggacgtccgcacgggcatggtactggtcgtggcaagacgatcagggtggacaaggttcccgagggtggatggtacctcccggctttcgaggtcgagaacaaggcgccgggtaggtcgtcggcgtcgtcatcgtattatatcggggaagaggagacgttggctttcaggcgattcgccgagtgcgtgaggactgtcgtaggcgatcaaggtcaaggtcagggtcagagccgagggggtggatttgaatgggaagtctagttttcacatcgtcaatgacatcattcccgatacgaatttcatgtttcacgtgagaaaacataaaaaacgcggaaacaaatttgtcgggaaaaaaaaagtttcttcgaaaaactggatatataaaggtggaaaagcggtcaacacatgattgaactacccttttctagtcgctcgacttggatcaacatcaatcatgtaatcatgtaacccccgacccctggaggagacctgcctcgtgagtactcgttcgtcatctctgttgtcctacccaaccccttcctccgacgcgcggacatggatcgacgaacctgttatgaagataccgattagaaccaggctagtccaggaagacctttcccgccccgccctcgaccatcatgccttcaccccgcatccaccctattccaaacgcgcgtcataaccatccctggtctgttaccccatctatccgtcccgtccgcttcaaacccggacgaggtcgggggtgggtgcttgatgatcaggaccgggtcttcacgcgggggaggtcgtgcgaggtgatgggccgtggaggtcatgggggtagggcgcaaacggggtccagtggagataaaacatgagcgtcgattcgcatgcatcaccctctgaactctaggtcgtcgtccaccgtccgtcgtcgtcgtcgtcggcttgggtgcaatggggttgtccgtcatcgaggtgcaggggactgaccagaccgctttctctatacgcaaatataggtcgtcgacgaggcacattaacactctagcgtgggtttgaacaacccaactctcatcaacgtcgacttccatcgtaagcatctctttctcatgtccaccctcttcgtaaccctatccccttccctacctcgcacaccaccaccgcgcgcacacacacccacgccaactcccgacgtcgtcgtctcgaatgatgcaaaatactattcagttctgcttcggatgagcccgagacgataacaatattttaccaaaacacatattttctgacaaatctacgacgacgacgtcggtcatgcgacgcgtgcgcgacgcaaagaggcgatatcggtggtgtttgcccttttcctcttcttacctcgtttgacaccctgcgcgctcttgattcggctcgatcgggcttgcggggagaggttttgacaaggaggaacgggttggctgatcgtctggttttaaattcccttctgtcgttatttcgatatcgatcaggtttctcggatgcacgacgggtcgacaacttgtgggaagcatacgggaacacgacgggctttcatggtgagtgtcgcgtgctcgatgccggtccccgatcctaccccggtcccgatcccgaccccctttccccaatcgctatgcccggtcatcagactggcgctcgccgcccacccgcgcctcaacaagatgacacctttagctcaatccattctccgagctccatccctcttgtcgcttcgacgtcccttatcccgctcgccccggtcgaccccatccgaaacggcaatcgcccctggtaccagccgagccgggtcttcggacctcgtgcgcggtttgaaaccgggatgtgagcgcccagtagaaggggacccgatcgggaccttgacctttcgatctacctcttttcgaagggtagatcgtcgccctgacccggacattcgttcgatttcgcaacgtcctcaccgacccgcggcgctccctctcctagcgtcttgccgggggaaggagaaccgcgggctcaccggggtcgtgtgatacatgtcgatcgagggtccaggtcgggggcgggcggacgagatcagacgtcttgtcctctcgaccgccggcgtgtcaaggcagggcaggagcactctatcccacgctttcgccccccgctgatcaggaccccgctcggaacgtctcgatcccgtcttggggttgggtgcgggacgggcggacgatcggttttcggcagggggtggtggggttcgtcgcggggacgacgaggaggcagaggggtgggtgagagatacctaggctttctgaacgtacggcgcgcgcgaaaatgaaaaatcgtctttgggggcgaatagtgccgtggcaagctcagtcgttttacggtcgacgggatgcttaccgatgttcgtatcgtcgtcttcgcgtttaggcgtcatcttgctggattgttcacaatcgtcgactgctgtcgaaccgggccgaggtgagtgagtacctttcggttgttgtttggtctgttgttgtacggctcgcactatcatatgatgatgatatattgccagctcataatctacgtgtgccccctcacgttccgtccattgtattctctgttccagacatacttggttcttcgaactctggtgaaactgttcctagtgccctgctgttcgggtcgtgtctgtttcaatcggataccgcgcccgagccactcatatcgtctaaccctgacaacgaaacgcgtttgacggtatcggtcttgctgaaagtgcaatgtgcggctcaagcagtggggctcacgctcacggagagtggcaaatagtcactgtgcggacccgctatggatctgcggccttgttttcactgctgtatgcgagatccctgtcttgtctcgctgcagatgcagagttggggaccggccaatgacgctctcgctggatgaaactctacaaaagcttgagccgatccttccctcacggtatcgaggtagccgcgacgcacagtaccgctggtagggatttccggaagcgtctcgccgaatgatcgctacgcctcgccctgatcttaggagaccacatgaagcaaggtcgtaacgccagacgtcgtgttcaggttagaacactcgtgcacaagccaaaaagtgcgtcacaacgaggtgtcacgacgagacgcggtcgaggactcattccggaccgtcctcgcagacatggcccgatgatcgcccttcgccacggactggttttattttcagtagtggaagccagggctggccgtgcgtcgatgaaaccaatgcgaggatgtgctaattacccgcgcaccggtgtgatggcgatgatgccctcttgctgcgctttgaacttgttggaagctacatcccaagtatgcgtgccttgaaccgatcctcgcaatcttatgtagtgttaactgcagtaatgcctttacgagaagaccgggcttcgtccgatgatccatctgtcgcatcatcttcggtcatcgaggagacgccgatgtggagagatcgctcgcctttctgccattctttgcaaccctggcgggtagcctgatactgccacaataccctggactgagcggtcgctcgattgtcgtcgtttcgcagtgtcgcaaaaacctcgtcgcgtggcgatcgtgcggtaccagctttgttcaggtcccgatcggagattcctcgtcggaagttgcggatgctataggtatggtttgtagtatggggcccactttggccgcgaggcgcaagcgcgctgaggtgtacttataccccgaatgatcggcgtgcacgatagcatgagaagtccttgactgacccgtcgattcagcaataaacggcaatctgacctctccgaatcctcccaagatgtccacggccttgcatcaagatcaaatcgatctcaaagtcgatgcgggtgaccatgtcgaagactacaagatcgagcatccagaacccgaatcgacttctcacggactcgtttcgggcatcgcgggcttgaatacgcgacaagcgatgaagcgcttctggaggctgctcctgatcggcttctccgtctcggtatcgggaatgtgtgttaaagataattataattaccgggacccgcgacgtgtccgttgacatttctgttggcgcataggtatctcggattcacgttgaccattcctgggtcgatcatcgtcaaccgaggtgagaccagagcgcgcagacccgacatgaacgaccgagcactgacacggttcgacaggtttcatcgatcaattcggtactgtgcgcaatgcggccactggcaatctcgagctcgacgccgtccacgtctccatctggggagggaccaactttgccgtgcaagtattgcttcaaatgttgtcccccatcactgcggaccgcttcggtctccgtcccaacatgtacatctttacgttcttcatgttgctcgtaagtcggtctcgattggcaagctgatgtggtccgatcgggctggaacctgatgagcgctcgcggatcgtgcaggccatcattgtggaaatcgtcgccaaggactggaaagcctttctcggggccaagatcttagcgggcatgtcggccggtttcatcgggacaacgatcatgtcgtacatttccgaaatcaccatctcccagcttcgagggccccatctctccgccttttccttcttctttgcgttcggtcaattgatggcagcggtcggacttcaggtactggaaacggtaggtcatgctatgtacagcattcctcaccctgacccgtaagactgagatcacgtttaccctgttcagacgactccgaacaagtacctgaacgccttttattccgaatttgccatctttggtatctggctcctaatccttgtgtgtctgccagagtcaccgggtgagtgggaggtcgagatgggttgcgcgccgatcgtctgacgaaccaggccccctttcgacagtctggctttgcaagatggaccgcgagatcaaggcgaaaaaggctatgcgcaggttgatcggtaatgttgagggatacgatatcgatcacgaatacctcgttatgaaacaacatctggccgagtcgcaagcgctgatggaaaagtcgtccaaattgggatgggtcgcctgcttcaaggggaccaatctgcgaaggactctgatttccacgattccattctccatgcaggcaagtaccgacgaagcgcacgtagccagctggactaccatgtggctgaccgttctcgtttaccatagaatttcgtcggtggtccgctcgttctcggttacactggtaggtgacctttttctagggtccagtacgcgcacccagtctgacggtgttctttcgcttgacagtctactttttcagtcttgctggcgttgaagacgcgttccaggcgaatctcatcatcttttgcatcctggtcggcgccattttggcgagcttctactttgtcgaaaaggtcggccgacgaccgctgttgatctacggaggtgcgatcatggcagtctgtgatatcgtcatcggagtaatcgggacagtcgaattgtcctccaagacgggaaccggactgatcgttgtcagcgtagtgtgggtgattgcatacgccatgtctgtcgccccaatcggtaggtcgcatctgtcacaaatctgagccggacaaggctgggattgattggcccccgttccctccaggttacgtcgccattgtcgagaattcgactcccatgctgcgagccaagacggccggtatcgccgctgttctccaatcactcagcggcgtagtctttgtgagtaacgcactgcgatcgtcaagtacgatcgctgatagtccagctcatgtcccgatagaattacaccgtacccatcatgctctccgagcagcaagccaactggggggccaagactggtgagctggatgacattcgacttgatgtacgaggctgacgatcgttccggttcctcttgcccctttttccctcgataggatactttttcggtgagccttacttggtgacatatctcgaaacacaagctgatccctcctggctctttctcacggcaggtggcttggctgtcttgttcaccatcctggtctggttcaccgtgcctgaagtaggtcggctcggcgatagtcgattgtgcaaacgttgaccatgcccgagtgctcctcgcagacccaaggccgaacgtacgaggagctggatgagctttacgagcgccgccttcccgcctggagattcaagcaagccaaaacgctcaaggacacccaggtcatgggccatgatcaagagtagagttgcgaggcgccgccgtggggagctcggcgaggttcgtgagaggttatgagagagaggctgagattgcggtacctgttgtctcttttggttgtgatttattgtacacttgtcaatgagatcgtgttgtctactatgaaatcgatcctgtgttgtttccggccaagaaacggccgttcgtatggcgagacgtggcttccggcggtcctggtcgaatgaggccactgccgaattggcagtcgcatgaggtgtagatgatcgaccggcattgtatcggtctcgagttcaatcgagtattggaagcgctatatccgatttcgccgtcgagaaaccccccttcattcaacaatcggcgaaaatgtccctatgagacttcgccaaaactggatggcaatcacagtgccatgcagtaaacaagacggtctcgtcaagtgacgcggacaggtgttaccagggaccgggactcgatgtcaccaaacacggtgagcatgtcgagcaggacttgttggctagcgaggggttgtgagcgaacgagtcgcgcggagagcgggacacgaggtcaactcactcgtgctcgtcgagatcttcgaggttctcttccagtctatggctagcaatccaacggactgtcgtatcgcgatgttggatgagacgatgacctgcgggcgatccactcaaagcccgaccgacctttacccaacaccgtcctgccattgaccgcgactgcttgtggaggccagcatcgtaaaatcaagagcaactcttcgcataggctgcgtgttaggcgtgcatgatcatggtccggtgcaaaggggtacccggagcgatcgatgatgacttgcttggccttggatacgtaacacctgcatcgggcaggccgtcagtcgttgcgaagccgggtcggcgacgggggagcacccacttggtgatcagttgggtcatgtagatgttcgccttggccacgacataggggtctggcctctcccaacggccatgtgatgatgccgctgtctctgccgagacccagctgtccgcgttggcctggaggtctctactcgtcgaagagggccaccgtcagcgccgagtcgatcgtcgatggtccgccgccggacgtacgaggctagctgatccccgggatcgagctgaaatggtctctcgcagccgatcaaggcgttgtcattctcgacgttgatctcgtcgaatcgagctagtgtggctcggacttgatcccactccaagcgaaagcgaccggcgtgatagaggatctctgccttttcgagaatcctgtcgatccgactcaatgtcagtcacgtcgccggctttgagcagaccatgcgcacttactcgaacagtatcgagacgtagcggaatccgaggatcacctcggatcttggcactctgctaagcgagctcggcgccgatacgtactcgtccagcagcggttggacatgggtcatcggctggacaatcgaggcacgcgccgttggcagggaacgttccgagtctcgcctcgctcactcaccccaaaatccacggatctcagagccggcgggtgggtaaactgtgcgtacccgtcgcggtcccgtcagtcgtcgcatttggtgagcccccccggaagctactgacgctacaggaatgtgacttgtctcctccgaatacgagctgttggatgacagcaacgccgagtggaactgatgagtctttgctatgggatccgattgacaaacgaaaagactcgcccaaaacatccgaaggtgaatctcccggtccaatgtgtctagaatcgatccgtatcaatagcttggacggtatcccgagaacgtcgagctcggtgcactcacccagaccaaagtaatgctgacgacgggggcaagagggggggaagatgcgcagacagatgagtggagagtttacctcgacaatggccgtactcacatcctcctcgaacagtctcaacatggtcgtcatctgcaccacttgagcccaagccaacatcgactggtcgtgtaggtccaggctgtccaatgcggcgacgagactgtcgacgtcgaagccgcgttgagcttttggtcgggtagaacgtgcgcggaaagtactaacaggtattgcgatacgactgtgacgaggaagcgatcgattccgccgagattagtgcgtgtagatcccctcgggagacaacactgagaacgactgacgacatgggaaggacaatccctcctattcaatcggacggctcgacgcgtcagcttgtcccgccctctgggtcgtccccccaccctctcatcgctcaccgccaccatatccttgatccgggtttgcaacgcatctatacaaccgaccaagaacccgtagagatccgtagggggtacgtcgatccaagagttgggcgccagtgccgtagtgtacgtcgcaatggccaggacgacggtgaggaattcagaagattcctggtcgaatccagcatcgagagcttctaggtgggtgggtggatgcagtagggggacgagctgccacagctatgacacgggcagtgacaacaaaggggttcaaccgagtcgtctgaccgggcgagtccgtccgtcaacccgaactcacatagtcgatgtagatatgctgaagatccagcgcgagcttccgcggcatatatcgatcgatcccccgaaggtcggctactgggtcaacgccgagacccgaggacgacgtcgaagggattatcccatgcgatgccgaggcttgagcggatgcggtacgacgacctcgattactgcgtacggggcagatatcgatgagccggcgggtcttcctgtgcacaacgagagcctccagagactcacagctgccgactcaacctgccttcatagctgtatcccttgctattatacggggtgctatcagtcgaacatgagcaaaagctggatctgacgcggctcgactcactcgggacctcgtttcttgacgacccggagccaagtacaatcgaaatccttctccttgcatcgtgcgcagcggtccgtcgatttgtcgtccgtgaagtcctcccggcatttctttctggtagatcgaagtaggtgtcagcgtccggctaattgggtagaacgcccctatactgacttgtcacggcggcattgatctacggcagcgggatgtccaggcgtcagctttgattcaactttttcgatgtacagccggaagaaggacctaccgcaggccttgctcggagcgtccatcttggggagtacccgatcgaatcgagttcaatccgggtgacgagttggaatatagcaaattcctgagtttcctatgcgatttcagtgaaagctcgtctataatgtctggtgcgacatccgagtgtgacgctgcaagtcgggtagccgaaccaatgactttccgatcaaatgaatgacattgcaccacggaacggtgaactcgtaccacacggatgactatcactatgaatcccgaccgtcaaagcacgtaggcatgtctgcgatgggcgttgctagacctgattgacgtacatcatcacttaattagtcaatcgagtggttcctcggctctgatctcgtttgcatccgagatccgatcagacggaagcatatcgacgttggtgtttgggtgtgacatgtggggcaacctgcaacgacatcgccccactagctattagctactcgtcgatgtccaggcagaatcgcagccggatgcttgggcaaatcataccaagtgcaccacaagctgtgcgcttgggaaaaaacagtgactacgatctcttttctttgttctcgctggatccagcgttggcgcatccgagacccctccagagcagagttccagctcgccactctggcgctaatacgagtccgtgtcttaactctggcaggttccgtcgactgggccactttgattctgcaacggcttttggatggtcgagctcgatcgagttcaagattaactccgactcgctgtgtccgtgttggcgcgagtaagaaccgcacggaagtggcgtggggaagagccgtacgaaaggatcggatttcgagctgccattgacaccacgtcgaccctgaacgcattcaagatcgcctgcgctttgactatcgcggcttgcaaggaggaatagcgaaccgcttgatcacccatcagaccgatccgcgtcagactcccaattctcctggggatcggcaagggttcgttcgtctgcaacgtccctgatagaacgcgtcgaaagctgccatggggcgaggcactttgtcggtcttgccggtcaattgtcaccgttcgtacagtgcgagatggcgattcaaaacgatacactccagttggatgtcgccgggggcgatctcagcagaactggccgagggatgtttgacccagataccgtcccggtcttcacaccgcttgcgatagtaccagaacggctcgtcggtagcgactgcgaatcccgactcgagcatcgcgacagtctcgaggatgcgataccatgcggtcgataagcgtgctatccgatctgcgatccgtccacccgggttggtgaggtaaagggcataaacgcggcatccggctgcaacgtaaaatcgatgtcaacaacgattttgatactcttctttccaaaagcatttggccgccgtggctttttgtcggtcccatcatcgtgaaagtgagtcgaccgcagcgtgatgtgagcggtgcggggggtgggggaaacggcgttgatgaccgtggcatgcgaccgacatccccgcatcggcacttttgctcagaacccgctcacatgtcaaagctcgctcccatcgaggcgcaccttactcacttctcggccacgtctctctcgtcagctctctcatgagcgcgacattcggtggccctgtcctcgaatctctcgacgactgtcccttcagcccatcccactcgatttgtcaagtaggcattataaagaggcgcaaacgcagcagggcaagctggaagaggagaattcagtgctgcgccgtcatctccagaaaagcccaaaacaaattcggaagctgcagatcgacataaaagaggtacaagtgagcatgcaagtgcaaataactacactgcagtgcgaaagactgcaatttgactgagagaagagggcttaccataggcaagcagcccgctacaggcgccgttgtgagagggtgtgttgtgtagtattgtttttataagagcgtgctgagaagcatgtgtaatccctcttagctcagtggtagagcgctacactagtaatcaaccacttgatgatatgtagcggtcagccgttcgactcggctagcgggaatagtcttttttgccatttcccccacctttttttcgctttggtttttcctgcgtgccggccggacgccgggctcatcctatacgcgctccacccgccgcataacatatcaactcgaccgaatgccgaccgggacgtagatcaagacgatcaaaccactgccggcgcagtctaagtcgttgtctcgaattccgtcgacgcgacaccccttcgatgggtggacgcgtacgaggtaaaacgcgggcccccatcaatggggatgactacactgggaatgtctttttgctcgaggttgcatcggatcggcaaagcagggtatcggacgcactgtaccatccgagtattttaccgcggtcgttggaaaccggcaccaatcatggacggcacgtatgcatgtcattctcatctatgggtagatcgacgccccggtgcgcgcgtcgcgagctcattacatgcacgtctgtcctcctcatctgcacatctatccgatccgtgttgttctctctataccggcggcggcgggcggcgacgacgactggctctcaccagatcctctcccacaaccccttgccgaccaacttttccacgtcgcctctttccaggacgcccctgatgaactcgcccacgacctcggtctcggctccggcgaccctcaatacccctccctgtcgctgttgatgtccttgatgttggtgttgctggtccctgctggtcgacgccctgccgacgagactgaacgaccacaacaacgttccattcggccgttgagcttgaaactgggtctggctggggtcttgcgcgaggccattcagggctcggaggagagaatcaaagtgtgggccgtagatgagcatcgtcgcgtaggtctggtacggtcgcatccggtccgccaaggccggggtcgtcgtcgtcgtcgtcgtcgtcgatgaccatccgggttcgtttgccaataccgtacgttcccgcatgatgacctcgccatccagtacgacctcgttcaaactcgaatacctgtcaaactcccactcctctttcgtccgtccagtcgcgacgatcccgctcgtcaccgccggcgtgttcgttttttgtaccgagagtgatctccccgcagtgaaccaatcgaggaggacgacgctcgacctcttgccttcgagcgagactcgttgtgcttgatggtacgaggacgcggcgtacggctgtacagcgttggggaggaggaggaggaacccgtcttcgttcacccggatatgctgcctctggacggtcttgccatggtccgtcccggtcccggtcccgctgccgatacccgccctgggcccgagcgataacggtctcaaccccggtctaaccctgaacaccttggtgctcccctgggtcaataacaacaacccggcgcgtgcttcgacgacgacgtccagactgatttcgtcccccgctacaagcccaccaccgtaagcgagcacgtagcacgtccccaagttgtccggtgtcgagcctagaggggacggcgacaagagtttgagggggtacgatgcggagaggctggagaaccgggatcgaccgccggtagctagcggggaggagaggacgaggtgaccatgccctggagacgaggctgatggtgagtgaagaggcatgctgcgatgcagaaccggagggttaggcgagcacacgacacatgatcagcacacgaatcgtcgcgatccccacgagctcgatgcgagagcgagactcacccttacacacctatcaccgactaccttccatgcctgtcactctgccgtacgattccgtagtgcaagacccgcaggaatggcgatagtgatgactcgtttcctagtagaatgagatgatgaactctgattgacttgtcatttaaagctcgactttaccctttgaacgcgtccaagtcgcgactcaacgaccgtgatcgaccgacttggactcgctagatgctcactaatgtggcatcctcgtcgcattgacctcatgtaaacttccgctcaagacctcattgcacacatcgagagacattcctggacagagcagatcgagatcaaataatctagtccaagtctccagcaaacgcgactcaaaagtctcgaaatcgggtcacttgagatagctccatcgatcgagaaaatcacctaggtagctcgacgaccaagactctgctacctaccccactcaggattctctgcacctgaccgaccggaacacgacgacgatgtcgctctgggtagacaaagtgagctcacgtccgcctcgcaccgacttgacacgacgaccatgacgacggcgacctctgatcacctgaccccgctcgctccgtagtaccggcctcgccagctttccgagctgcactaccactctgaactctcggaccgtcttcgatctttggcgagtagcggagacttccctcacatgctcgtttacggtcctagcggggctggaaaaaaggtgcgggcctgatgcttaggtcgggatcgggcaacgcggctgaccgccgacggtttcgagggcgtgtgtagacgaggatcatgtgtactttgcgagaactgtatggacccggggtagagaaagtgagtgctcttcctctagctatcgagtcatacggacgagcctgtcccctgacgaccgcacctatcgagtaccaactgccctgccctgctttgactatctttccagctcaagatcgatcaacgagtgttcgtcaccccgtccaaaagaaagttggacgtcaacgtcgtgcagagcaactaccatatcgagcttacacccaggtaggtttgctcatgctccgtaccctcattcagactgcgcatcgtgtctcgtgtggctaaacaggcgcttcgtggtcgtcatcgcagtgacgtcgggatttacgaccgggtggtcatccaggatattctcaaggagatcgctcagacgcaacaggtagacctcaacgccaagcagaaattcaaaggcaagtcgacatgctcgtcttggcatcggcctttatgctaacctgcggaaacttcatgccgactcccctagtggtcatcatcaacgaagccgacgctctcagccgagacgcccaggcggccctccgtcggacgatggaaaagtactcgaccaacatcaggatcatcatgtgcgcgaattcgacgagcaagatcatttccccgatccgaagtcgatgtctgctcgtccgtgtcgccgcgcccgaggaggacgaggtcagtccaggtcgtccgtctagaggagataccgatcgagattctgaccccgactgagaacattgcccgacgatcgacgacggagtgcagatgctcaaggttctcaaacacgtcgctaaaaaggagaggttgtcgttgccggacgagagcgcgttgtccatcatgcacgaggcgaacgggaacatgaggaaggctctactcatctttgaggctctgcgaatgcaaaggtcagtctccagtcgttcgaaattgggatacgcacgctcgccctgtctaacccggcacctcgtctcgtcgcgaatcccagcccggacttgtcgtccaacatcgacatcgccaaggccgattgggagacgtattgtggcaagatcgcggatcaggtcgtacaagaacaatcgccgcagaatttgctaaaagtcaggacgggattgtacgaactgttgtcgcattgcatcccgccgaccatgattctcaaggtaagcgtttgacgagcgattcctcgatcgtccatgctcgaaactgattctcgtgcaaaccgcttcgcagactatcaccggcgccttgctactcaaggtcgaccagacccttcagccgaccatcattcattgggccgctcactatgtgagttgaggcccgcgtgtgataccgcaaaatcgcccgcatactaagataccgatacttgaccatgtaggaactgcgaatggcgcagggaaacaaaaagatctaccacctagaggcgtactttgccaaactgatgagcgtgctcaaaaatttcaactatctcggattggacgacgatatggacttctaggcgcggcgggtcggcatgacgccaggttttacgaattacgacaagcgctctgcgttgatgtatcatagagatgtataatctatcggcacatggggcaacgactatgcctttgtgcgagcgctttccatatgcgtgaagagcatcacgatggggctgagaaagggtgcggataggagagctccaccagaagtgtacccgtgcaggaagtcagggtcgacgagggccgcgatgggagggcgctcacaggtgctcacggacgcgcatcagggtcggaagaggtgctcatgaccgctcacgaccgctcacgaccgctcatgccgctgctgaagcacgcttatgggccgcttgtgaaactggtccgcatacctgtcttcgtcacatcatacttcaggaaagtgatcgcatgctactgatcggttgaactttaccccaggtcgcaggtcagattgatcgtaacggcgatataaggcaaaactagcgcaaaaatcactttggtccgattttttttggtagaacacactcatactcgttctaaatgcgactctctgcacgggccggggagtagcgtctccaacagggcgaagattcagggctctctatcgacatcttattcaggttgatcgacatcgtgttcaggatcacctttgtcgcttgcagttgacggttcgatcctgtcctcggcagacgtgtcttgtttgacggctgacaccacataaggatatcccatcccagcctttattctctcgtagacttgctcgctgagtgttctgaggtggacagtccgaggtacttcatccccaatgtacgcaatgatcattgcgccctcgtgctggtcggttgtaaggagttggagtacatggaaccacatcagttcttggtccggttgcgcttgtattgcatccacgatggcttcgtatttgctttgaaagggcgatagactttgttgcttcgcgctcgagggccccagctgactgccatcggggctgacgatcgtttccgacgcctcgaggaaacagtccctaaaacgtttaccttccgcacacaaccactcgcaatcgtgttgttcgagctttttgcggtaataatcttctaaagcttcgggaccctccaactcatcgccgcttgctacggcaaatgatccaacgacagacgtatcatggccggtagcttgagtggccgaggggtctaacgtcaactgggactgcattacagacagcagcgttccgtcggacggaacgggagcattgctgtcgtgcactggcctatcaagcgtgttcttgtcttcttcccagggggacatctttgtctcggtacaaggtaagtatcaaaaggatgctattttgaacagttgagcccgatccgttcactaattcgacgccccgcatttcggataaaattgatcggcctactatatatcttcatctggccaatggtgtgatcgccaagaatggctggataataacgtcatttcgtattcctttgtgcttgaatgtcccactcagattgagattgcaaattcctgggtcctggcctgcttcatctcgagacgcctgtgcaaagtcacggaaacggaagaggcaatgctagcgcatactattttgcatcgacttcatcgtgattattgcaaacaaacatgttcaatcacgcgtagatgagaagataccgcgaatcatcgtcgcccatggcttcccttgtgtacctaggtggagccagcttcagtgttcgttccgggaaggtcaggtaaagtaccatccgatggaccaggcggacggactgccgatgggccttgcggaagttggtctgtcggtaagatgaggggttgaatcagattataaaaccgccccaacaacgctctggcgaatcgcctaatgtacacctcctgtccgttcccgattcaggcagctattgtcgatacgttttctacacgtggccccggttcgatttcgaagaagtggatccaattccgaaactggtttggtcgcgtttgaatcgcagtttcgatagcgtcgtgaatatttccgaatgtggatggtcctgcgcgcgaggatgatggctcagggcagcagacctcgccataaacacggagcaattcgatgtacacatcactatcgccttggtctttcgactccatgtacttgcacccgaaagactcgaatgcagcatcgaaaagcttcactaattcggtcggtcgcagcgggttatccccgatctcgtccttgtcatcatccccctgatttgaagaggtcccgactgtggcctcaccactcttcttgtctcccctgaaggaattctccacagagtccccgccattgttgctgtctcccgaggtgaagtctctacttgattttttggacggcgcagtagtctgaatcgtcccgagtgaggcgggaggttgacccctttgcagggacgtgtcatcggaaatctcatcttgttccgaagcgggcatcttggtcttggtctcgagagaggtcaaggatagtagacagttgtaaggtcgaagatgacaggcagttgtcagaggtttctgaaccaggacatcgcgaggttcgccctgcgcgagaaatcggttgacttttgtcccacatagttattcatctggccgacggtgagatcagcaagaacggctcgacgacaacgccatttctgtattcctttgtgcctcgccatcaatgtcgtgattcgctgaattgcggtgatacccactgcgggggagtccgcccgctgagattgatcgcggcctctcgtctggcggatgatggaatggttcatagtcgagatgacgagatcattttggcttgattgcgtgccactcgatgacccgggttgtactgctgtgccacccaaggctcgtaatataatcgacgagagtcgccacatggtcactgtattgtcgtgcaggagatgagccgcatgctctgaccctttgttttgacttgtcattcgagcaggacttgccaaacgcgactgcccagtgtagcgttgtccgatctcggctgactttcacacctgtctcgtctatcatctcggcgtgtgcggcgatcccatcttggctctctgtacgtcgaatctgcacaaccacaccccgaaaccgcctcccttcagtggcgtccgaacatcccgacattcatcccgaacactcgactcacatccccaacaagagggcgacgaccttcatgcaattctcaaactccttttcgttcggttcactcctcgccaacctggccgcttcgagctgtctcgaaaagaccttgacgagcggtctagccgtttcagggaggtatggatgtcgccataggtggtaaaacgagtctttcgggagtcgaggatctcgatgagggggcgtgtcgggcggggcgagcgagtctaggccttcgactacgacccctccccttctcccactcacggcccccgacacatcgccaccaaatattgggtgataacactcggtaatttgaaacgaatcgcacgtccgccagggtcaggtacttcaaagatccgtcaacatggtagacatgcaggcttgttgaggcatatggcatgatcccatgcgaccgacgaaaaaaggttccaccgagtagagtccacaacagcgaacgtcctcgtctgattcccagaacgcgcatcctcgatcttgacctgatctcttgaaacaacaatgtatggtatgctgaatccgaataagagactcccaaaaggtagataattcaaggtctcgtctctttcagtctcgagtagtaccagtctccgcccgtgacttgatatggaaacgacctactgcacagcgtcaacgcgcgcgaggattgcatgctggttggtgctcgagactagtcgccgttttttggaagacgggagcgacgatatatggctgatcagtcagcatgcgtcgtatcccaacaaaaaacatgcacctaccaaactgaatgccaatgatggcaaggacttgatgcgtgatgcctgattctcgcatatacctgaaagacggcgagatcaggaggatcgcggtgttgcccaaaaatcgacatgtgcaaacactatggggccttacccctgacaacattgaaccaggattcgaggtcgaggttcataatggaatagccgacttgcgataacgcgttgtcctcgacgacgatcgtgtttcatacctcacatccggcgattacaggatcagagtcgcaagtgcgctgtgccgagctatggttaagggtctatcagatggcggcgcgtcgcaggctctgttcaaaggcgatatccgaccccttgatctacaagcggtccgatctggcactgatgacaggcgacttgtctatccatcggtgtactcgatgtacttacgtacttggtggggtgtcggggtgtgtgctgtgtatgattttccgttgtatttgatctcgtagctcgtggcgtttgtatcgcgcccttgttcctttagtttacggcatctcactactcgttctctcgaccaacattctctcgccgaaccgaaccgaacccatcccgccggccgcccgctcaacatcattctatcatcctcgtagtcgttcctaagacttgcaattcgcaactcgtcgtaaccttggctctcaacctagaacccatcgtcgagttgtctcgagctagttcatctagaccgcctcatctttactagttcgacgggccacacccgaatcactcgcaccgaccggccaagcgaccgagcgagagatcgcgagagagcaaggtgtccaccatgtcgcgcaaccccaaccacgctcaagatccgttcgacgatttcctctcgtcccccccgctcggcagtagaggcacgaatgggaataacaatgaactcggcgggtcgggaaattcgggtggggttttcgagagattgggcgaggagaatggggataggcatatggatccctttttcgacgagtgagtacatgttcaggataggcgctcttcgaatcacagccgggttgtgttgtatgagtcgacctgcaaaccggcggatcgagacgtcgtatggaaggctgatgcgatattcatacagtgacgacgaccttcctcaacgattcgaccccgtcccgcatccgctcgaccatgggaacaccctccgacacgttccctcgatagcctcgtcatcgatgcaccagacgtccaacccttacggatccggaccttcccaggatacgttgaacgccccattcgctacccgagctcaacctccagccgggttcgacatcgacatcaagggtggggacctcatggatgacgagtacgatgacgaggatgaagatgcctacggaaacaattcccggtcagcccacagagggtacgctacgggtgggcgggaggacgattacgcgggatcttcgagcaagaagagtcagcgtgatgaggatatggacgaattcgaccagatcgattccctctcgtgggattatgccgcacaggctctcccgcacctccaagctgatagggacggacgaggagcgaataccaacaacaacaacagccacggcgttccacaggcttatgaaccaaagagctcgttggtggatcatttgaaacggttgaaacccccctcggcaccgttatccagcttgaaggatctcaatttcaacccgttctccaagcgtcaggcgggagagggcgaggtcaggacgatctacctgaatgacagtcaagccaacggcaagggacgaggagggaaaaaggggacggagaacgagggcaagaagaggtggagaggaaacgagattgggacgggaaagtacaacgtcgtcactttcttgccaaagttcttgttcggtgagtcgggccgggcaagaagatcgaacggggcccgtacggactcaagcacacgttcgcggaccgctgatcgtcggtatgccgggattccgggtgttctgcacggaaaacagagcaattcagcaagtatgccaacttgttcttcttgttcaccggtacgtcctcgccgccacaagaatgccggatcgtcggtggatgacccgggctgacacgccatcctccaccccagcttgtattcaacaaatccccaacgtctcaccgacgaaccgatggaccaccatcgtacccctcgccatcgtcatcctggcgtccgcgctgaaagagctagaggaagacgtcgtgagcatcgtcgatcgggtcgtcggccactcatgtcgttcgtcccactcgctcaccctctacgacccttgcgcatagaaacgacacgcctcggatagacagctgaatggcaagacgaccaaggtgttgaaccccgtcacttccgggttcgaggacaagacgtggagaaacttgaaggtcggcgatttggtcaggctcgaaaacaacgatttcataccggccgattgcgtcttgctcgcgagtagtgagcccgaagggttgacctatgtcgagactagcaacttggacgggtgggtgtcggtttcctcaatcacccctgctcaagagcgaggaagcgtgcactgacgggtcgcctctgtcgaatgtcagggagaccaacttgaagatcaagcaagccaatgccaataccgctcaactcacctcgcctcaccacctatcccgactatccggccggctgcaatccgaagcgcccaactcgtccttgtatacgtacgacgctacgctcaagtttagcgaatccggctcgggtcagggcgaaaagacggtcccgatcgggccggaccaaatgttgctccgaggcgcgcagatcaggaatacggaatggtgtttcggtctcgtcgtcgctggaggtcacgagaccaagctcttcaaaaacgctacgtgggtctttcgcgaaatgatgaaccgtctttgccaacccgttgaccgacttttcacgtcgatattggtagcgcggctcctatcaaacggactgcggtcgagcgtcaggtcaaccagcaaatcatcttcctgttcatcctcttgctcatcctctcgttgatttcaaccatcggaagcagtatccggaccgtaagtccagctcgtgtacgatagcgacccgagcaaaagtgaccaattgttcttgaatccctgcagtggttcttctcgaagcagagctggtatctgcgaatggaagaccagaccaagaacaagggtgggtcctgcgctcactgtatatgctagacttgatgctgatcaccacgcacgatagccacgcaattcgtcgaaggtttgtgaaaggctttttccgaaactcttcagaacgtcgaactaacgaagctctgctgtctcgcagactttctcacctgcatcattctctacaacaatttgattcccatctcgtatgtctcgatactagcatgagccggtcaatcgatctgatggacctttctaccctcagcctgatcgtctcgatggatgtcgtcaagttccagctcgctcaactcatcaacaccgatctcgacatgtactatgccaaaaccgacacgcctgcggtctgccgaacatcgagtctggtcgaagaactcggccagatcgagtacatcttctcggacaagaccggtacccttacatgcaacgagatggagttccgcgaatgctccatctttggcaccatgtacgcccagaccgtggacgagagcaaggcggaccagggccaaaagaccttccaagaattggagaggcgaatgatggagccgggcgaagaaggcgatatcattcgagagttcctgaccttgctggccgtgtgccacaccgtcatcccagaggtcaaggatgagaagatcatctaccaggcctctagtcccgacgaggcggcattggtatccggagctgaagagttgggataccgtttccatgtgaggggcatctcggtgcggacgagataccggtcctgaagactaacgagtcgtgctgtagacccgaaaaccgaaatcggtcttcgtcgacataggtggcaagtcgaccgagttcgaaattctcaatgtctgcgaattcaattcgactcgaaagcgaatgtcgaccatcgtaagaatgcccgacggcaagatcaagctgtatacaaagggtgcggacaccgtcatctacgaacgtctggcacaaggcggttcttcgttggccgactcgactctcgttcatctcgaggtgagccacgaacgatctgcagcccttcatttgaacactgctaaggtgcccttccgttgcaggattacgcgacggaaggtcttcggactctgtgtcttggagctcgcgatatatccgacgaggagtacagtagatggtctgctacgtacgatgcagctgcttcgcaaattcatggacgagctgaggctctggaaaaagttgccgaagtcatcgagcgcgatcttacgctgctcggagccaccgcaatcgaagacaagctacaagatggagtgcccgacacgatccatactctgcagcaggctggaatcaaagtgagaccgcgaatcaagcaaaggaacaggccgggattgctaaaccgtgtgattttggtagatttgggtgctgactggagatcgccaagagaccgccataaatattggtctatcatgccgattgatctcagagtcgatgaatttggtaaggtcactgagaagacgactagcggaagtcgagcctcaccatctttcgcttcccctacggtggataggtcatcgtcaacgaggagaccagcgaagcgacttctgactttctcaacaagcggctgttcgctatcaagaatcaacgcaatgctggcgacaccgaagagctcgcgcttgtgattggtaaattatggctacttcctgagaattcgccttgaatcatactaacgagagcctttacatcgtagatggcaagagcttgacgttcgcgctggaaaaggaaacatctaaaatcttcctggagttggccatcatgtgcaaggtacggggctcgctttgaatcgatagccagttcggtgcttatgagcgggtttcgacaaattcccaggccgtcatctgctgccgagtctcaccgttacagaaggctcttatcgtcaagcttgtcaagaagaatcaaaaggctatcttgctcgccatcggtgatggagcgaatgatgttggaatgattcaagcagcccatattggtgtcggtatttcaggcgtagaggttagtctctgtgtcactgtcgctctgcttcggctgctgactgtatttgggtcgctcagggtttgcaagcagcacgatccgcggatgtggccatctcccaattccgtttcttgaagaaattgcttctggttcatggttcttggagttaccaccggctgtccaagctgattctctgtgggtgtacgcgagacgtcccgtcgtggattacctgactgatgaagggcatcggaaacttacagttaccttctacaagaacattgttctttacatgacgcaattttgggttggttctcggtattgaaatggagaacgtttgaaaacagctgacgctaaatgttcccctgcagtattcgctcttcaacgactactctggacaaatcgtttatgaatcgtggacgtggtccttttacaacgtccttttcacggttctaccccctctggtcatcggtatctttgaccagtttgtctcggctcgtatgcttgaccgatacccccagctttacaagctcggccagagcaacgcgttctttaccaaatcagcgttctggcaatggattggaaacgccttttaccacagcatcgtgagtcatgcctatatctgccatgcgaggtacgcctcactaaatacgtgtctcgattatcaatcagcttttattcttcttttcgattctgactttctggatgggcttaaagcaaagcgatggcaaagacacgggccactggttctgggggaccacgctgtaccttatggtactgctcaccgtgctcggaaaagctgcgctggtttcggagtgagtcttacgatctcgagcaggctgtgagcgtgtgctcatacgggtcctatcccgcttcgtagcgtttggaccaagtatacccttgccggtgagcatcgatcctacctcttcggcatgacatgcatgactgacgcatcctcctgacttcacagcgattcctggctctttcgtcttcaccatgatcgcactgcccatctacgcactggttgcgcccctactgggcttttcgctcgaataccagggtatcgttccccgactctggacgagcggtgtcttttacctgtgcctgttgctgtttcctgtgatctgtctggcacgagactacgtctggaaatagtgagatactctgtgggccgaaacagtctagcggacctctgattgaacccctcttcacagctaccgaaggacgtatatgcccagatcataccacatcgtgcaggaaattcaaaagttcaatctgtccgactaccgaccgcgacaagaacagtaagtacagcacaaagacgtcattgcacttgatctgattagtaatcggttgcaactggacagattccagaaagctatcaaaaaggtccgggcgacccagcgaatgcgacggcagcgaggtttcgctttcagtcagaccgagagcaacaaccaggatcaagagcgactcattcgatcatacgacaccagtgtccagcggccgagcgggtattgagctcattgcctcgcggctttacctgtatcaatatgcatttcatagagcatgcatcgcgaaggcgcacctcacatagcttggactcaaactctgccttcgtggacgtcttagacaattacagccagctgtgattctacgtacaatggctaggaattgtttagttgcattctttaccgacttcgcaagctccgccatccacgagctgctcaggctcgggcttcttctccttgctcagcctctcgaatacctgtaaaaaggcctctggcggctgagctccactgacggcgtacttgttcttaaagatgaagaatggcacgccggaaacaccgagctccttggcttgtcggtacccgtcattgacctccttgtcgaaagctgacgagtcgaagaaatcgttggcttccttttccgaggagaagatgcccgtctcgatggtggtcttgaccaggtaaggtcgctgaccagggtcctgttcttgctcgaaatacccggtgaagaaggattcggcgagctggcgttgaagaggctcgccacccttctcataggcgtgggccatcactcggtggtaatcgtgcgttcgagacaatgtgccgccatacgagctagcgaatcgggacatgtggaatgagcatgttagatcatcaaggtctggcctgtcagtacccacaagttgataccgacgtctttcccacgctgaatcatctgctgctccatagcagcgaccctctctttgcctccaaacttttgggcatatcgatctcgcttgacgacgggatccttgccgagggtcgggtccaagaggaatggcttgaattccaaatcgaaatcaaggttgagctggttcttcttggcaagagccactccctggtcgtagtttttgtaaccgatgtagcaaaatgggcctgagatatatcgaacgtcaggtctagccgtgaaaggaacatgcatgttcgtgcggagcggcttacaaatggcatccgagaccatctccaccttgatcttttgagcggttgaggtagacatgttgcgtgtgattgtttgcaggtggtatttcaacacgtttctgaaaatggacatgtaagaagaaggcggagaagacttttatggcagatggacgcctggccttatatgcgtagaatcctaatgcatctattaggtgtctgctcgactttataatcaatccagtgccggtacctaggaggcgatccatgatgagtaagccggcaacttcggttaaaatcacgtgacttgtcggtaatcaaagatgaaacgtcacgtcagacaacgcatcgcccctgatcctacgaggggcctcgggagagacaggagcggatgtcgcctgcccacggatcagggtgaaaagttacatagaggtgacaaccctctttaacaaaggaataaagagatggcagtcgcagtcgtatgctaaacaccccttcgaacaaagatgtaacatcggttcatcagcaccattatttttcgtcatttccgatcgatttgccgtatctccgacagtattacattgaacaaacttgacagactatgtatcactttcaataccttgcatttgtcccattcttggtactggttgccaaggccgctgaatcggtggaaccaagacccctacgagaagccttgtacgaaggggacgacttcccgcgtaagttatatttctcgtatacttccgcataccacgcgctcacacttcattagcccactaaagtgactttccaggtctcaatcgaggtcttccagctggaactgcagggagaagtgaaagcaaggacgatcgacgttccggttacgtacgaaacttggggtcaaatcacgaatgatcacggtgatctcggggatctcagactcttcggttgtctggatctcagtgctcctccattcagcgatcaagtccaaggcccagttttcattcaatcgatcaggcagaactggatcggtaccgaggcggagaacggaaaggacgcgttgttcgcgatgaaccgtgtcattgtcttatccgactatatcgctggaggcgaggacggactcggtaaatgctcttttccctcagaagacgaaaaggtatgcttcgtgaatctgggtgaaactagccccgcagatgatccggtcaatatcgactgttcaggtgaggtcaacccactggtatacatgcggtgtgacgacgatgctaacggtcgatgctgtacatcaggcgttcgggataagttgggagtggctttacctgaaggtgccaaagagggtgcttatccagccaatgcaatagccttctcgggtccgtcttgggatgaggtcgcagaatactcggataataggcggtagcgggtctgtcttcagacctcctcacacttcttgtatttatatccatgatgaacccgcgtttcgatttggacggttcgtgctgtccttcgaaatacttggtcgggtgtgaaggagcaatgacatgacaggtggggctgaagctgataggttgtcacgcaaaaaggcacaaaggagataacaataaggtaacacgcttatctgaagagagtaagataagagaagatcgattggcaaacccacaaatcttgccggcgctgttgagcataagcatacctgcagaagaaagttttagtcgtcatcaagttcagtcaaaattcacgaatgactgcttcccttgtctgctcacaaggaccagaatgtggacggccgtgaccgccagcatacaacttccgccgagttatcgaacatcgatattcacctttcaagggaaaggatcctggatcctgacaccccgcacaagggcgtccactcgtgtactctccgtgaggacggagaagggaatacgtttcgagtgcgactaacccgattctcacttcgctccgtgtttccccttggggtaaaagatcagacaaagggattgtgatatttctgttcaatgccgaggaatccgtgctcgttacgtgtgaatagtcgcttatatagatacatcatcgggattgtacggctgcggaatcggaagcggtctcatgatagtttcaccattctagaacgaaatatcaaaagaaataagaaaaataaaggtgtggatgttgaagagatcttgcattatcgccggcgcgttgttctggcttgacgccgttcatgcaatcttcggattaggtggcacgatcacagaattcagcgtggtcgatcttgatacagttgacggctttccacgcaagctctatcctcgagtgctgtattgtggtattgatcccgcttacgcatttgttttcagtaaactttaccatgaaactacaggtattcgatcagaatgcgcaggacaatacagggaggtggaagtcactacctctttcaacttggtgactcgagatgagcctgttataggcaaggccgaagatcttcgagtgaccgcctgtattacggctgcggctgtgaacggcggtcaagaaggggccgataaatgtcggctggctaaaggtcggcagtgctgggtcggggaaagcaaagacggcaaagacgctctctttgcgttcaatcgcgtcatcgctcaaacggactccgaaggatgtagttctgccacaaacggagcctgcgagcaatcgctaggtgatacagagcccgggaaatatgaagacattgattgcgcgagtggcagtaagttgatttcagccaacaacgtgtgattcataatcagctgaaatgcgcatgtcgccgtagatttagtggatgatctgctgggattgaatgcgagcgatatcgagaggcccgattgggtgcccgtgtggtcgcaccctgtggggagcatgccagtctctggacccacgatgggagagatcaaggcctacaatggcggagggtgatcgtacgtcttaagactcttcgctcaactgtaacaacgattagtctgcgtgatgagtcttttgtgctgtcaagatggtgttcgttcctgcgccataggcaagatcaatacgtgcaacgatccgaacggcattggacttgatagcgacggtcgttatactcatgaaaggtctgcgagcgaggccgagaacgggaacagacagatgagtattcatctagagctcgggaccgtttcgatcaaagacgcgagttgcgcaagcgcgcgccagaacatcacattcacttcttttcatgagtgcagcctctcatgactggtcctgatccatgcatacgcaccatcattgccatgccattctggtcacgttacagagttcgaagtgataggctcagctgataaactcccgcagctgtcgtgcgctgacacggggacgatcccgcattctgtcagctgatcatctgatcaagtgtcgtcgcacaggcgctagcaaacaacggaaacgtgatgacgaagcgcgtagctgcgggaacagatttgtctcgtcgatcgagtgagttagcggcaaactcgcagtgtgagacgggtgtgtgagatgcctgggctcgatacgtgatcccgtgagcagaccacatcgtaaccccggcggcgatgacgagtgagggagtggataatctttgctcccacagcttgaatccatccaggtaccgttagtgcgatcttccttaggctagtacatgcatatatatatagctagccttcgcgtcataggatgtgcgtgctgtatactcacaatcagcttcttccttcgccaccatacgtctaagctcatccgatcggtccgactcaatcttcccgaaccagtacccaacctaccacctagtcctcagaaactcgacgcaaacaaacatgctcgctggactcgaagcagctcaagccaaggtagagcagattgcaggattcgggaagaggaagaacagcaaggtacgcccgggctctccccgtcatctaccttttaccgctcgctaatattctcgcttgatcacgtctgatcccactcagactggagagctcgaacgcatgtccacctctgctcgtcaagaagcccgcaggctttctacctcgaggaacagtggaccgggatccgaagccgcccgcgccgaggccagagccgctgtgggtcagaacaacgccgcgacgggaagcgcagtagacgatactcctgctccggcccccaggcggaactcgatctgtgagtcgtagcaagtgaacccaatcgactgaaagcgaacactgaaccacgtcacccgtatcgacagtcggcaagaagacacctaccagccccaagcagtaatccagcagtcaggcatgtctcgcttccagaaagcaggcgagacagctgtgctcgttttccgctccccttatgactcgatgatcccacgaccttgactgacatgtacaaacgatgataccttctgaagtcaaacaaacgaatcgaaccgagcaacgttgtacttgtaataccctttgatgctacgaaagctcagacgtgatttgaatacgatatctttcgaagtaccgatctgatcaatgcgaccttgctgttgttcgtgctagtgtcgacgagccatagtcatgttcctgaagaaagcgaggaaatggcccagagagcggtgacgaaacaccttttgattgatagggcaacatcaatgtctctccttcgtgttcacgtcttgatacaaggaattgggtcgcaagcctacaagattgagggttggcatggcaagaattgtacacgtgcattcgcctgattgagagtgatcacaagttggctctcaaggtagctccggtcagccgctcgtctgcagtaaggagcatccaatcagctcaagccgttcgaacgagttcgctcaatatcggcttacagttctgcatgtaggaagattctcctggcatggtgacgtgcagaccgacgctcttggcgtcgaccatctcagggccgatatcactgagcttgggcgctccgatgagccgcaagttcatctcgaattcatcctgcagtacggttgtcgtgtcagcacaatatggcacgcaaaggacgtcccgccagactcaccttgaggatctgcatagcctgctcgataccttcttggccataggtcgacatggcatacaagaacggtctattggacgcaatcgaaagctcagtctcgagccgttagcaggcgaacactccacgccgacggacctgccaataccgactgccgtggctccgagagcgacagccttgagaacatcagatgcgcgcctgacaccaccatcgaccatgatctcaaagttgggtacgggccacatttttcgttgcttaagctcggaaacgacttcgaccaggacctcgataccggaccgagcgaattcctgagcagcatcgaaaacaatcagctgcacttccgaaggtcctttgagaggtcgtcttgcctgcacatacaagctgacgtccaccgtggttactcagtacgacaccttgcatgccagccttgatcgccagaagaacgtcctgatcgatcgccgcggtcagcttttcttgactgaccctaagactgacccgcatatcacgatgcgacacactcacctcgtagcactgtacccccttcaacaagatcggcaacttggtcaccgtcttgaaccaagccaagtcctcccaagacaagctcgaatcgataaagctcgagattgcccttgcggcaccttgtcctcgctcgacgacgttggtctcctgcaccttggaaccggggtcgtcgaacttcatcctcatgtccttctcacgtcggccaagttgaggagcatcgacggtgatgaacagcgccttgacgccgcgggattcggccttttcgatgatcttctgggtaagagcacggttggagtttacgtagagctggagccactgagtctgaccgggaagggctgcatcgagcatttcgtccagcgagcaagaagccaaggtggggatctgccgtgcatgaatagggatttgtagatgacggaccatgccggagctttgaaatacccagactgaccatctgaatgacgtcgtgtttccccgcagccctcgtcaacaagacttcgccctccttgtgtcccagcttaccaagagcagttcccgtctttacgcaatcgacacaaggcactgatcagctcacgccgtcacaggttgtagtagctatcattccactcacgacgtagacgggcatgctcgttttggttcccaagaccgttgtactgtaatccacagtcttgacgttcctcaagattcgaggtctgaaccagatcctctggaaagccaacgtgttctcacgcatcgtaatctcgtcgtctgctccggacgaataatacgcccatgccttacgggacatgacttggtttgccaaatgttcaaagtcgtgcagcgagaggatcgaagagatgtgaggcaggagagacttgtcagccggttggttgatagtgggttcggatttgacgagttgttgcgaagaggattggttggtctcttgcgaagaggacgaagcgtcgaggtcgggcttttgcttggattcggcttcgccccctgcctgttccttttcggccgtaatatgaacagtctccttcatactgttcgggtcgatgggtccgatatacttgtcctcgggcagattgtcaccgatgacgccgggagggtggataggttcaaactcttccgtagcatccttgcctgcgtatttactggagatccaacatgtttggctggtcagcttccggtggtatgtttagcaggcaatgggaggctggtgcttacaggatgatcttgcttccacctgcatcgtcattctgatcaatgtcaataccacttcgaatgatttggattcgccattggactcgcctgggtgctcctgaggaatatataaaagtagagtcagatactcggacatggacgatcggaccgaggaggcaaacgcacatcgagccattccgtcacgtcgtacaccttgcctgttcagagggatcgtgtcgtcgacaaggttcataaggatacacgatcagagaagaacaggaacatggaatggttatccgtcagccgatctgaagttgtccctgatggacacggggcggtgcatcgaactgaccatgtacaatgacccaaacgccggtctctcgcgtcgtgtgctttgcgacctcctctccagatacgaacggtttgtcagcctcggacattgatggagattttgtgatatggaactacgagtagaaggtacttgaaacgaacaatactctgggtctcaaagtcgtggatactgtagctcgatcgatttgtgcacatcgactttatcggagatggtgaccttctggttggtcggaccggcaatatgttcggcaaccaaaggccgagaacggaagcaaatgcaaacagaagtcaacgcggaacaacggccgaacgcggttcagaagggttgttcgggctgaaacgctggaatcgagcgagtgacatgatgattgggggcgaaagtgctcgttcgcggtgagccaaagatgtcaagacgacaccctaggaggtgggagtttgcatcccagtcgtaagctaacgacccgcaagaccgacacggcgtactatggcatcgaaaaaaggaatttgcgatgctaggaaaccctgacgataccgcccaggtcaatgagcttgaacgatgatgtatgcatgactttcttcagtacgcgtacatatcaggctgcgcgaatgttcaacgctatggcggcttcccatcgccgtaaacagcgaacccctcttctcgactctgcttggtgccccttccccatcctctgggtatactatcgtttccttcgcctccagattgcaaagcacgaggatcttcgcgaacttcaacggtagtcgtacgctgatgttgtatcgctcctttagccgagttagacttggatcgcgcgagatgctgttgagtccagtccatccccttgcgagcgactgccttgatccctcgtcccgaagcccgcaacaacgtggtcagcgccggctctcccgtcatccgggtctgctgggaacgttcgtctgatccctcgggagcgaggaggctgctgacaccgctcctcgaccaagtgctatcatcgagtccagacctggcggtgccaatcgagtcgccatctgtagtgttcgactggacagcagtcgatcgatcttccccccgcaaatcagtcacagtggaatccttcatggctggttactgcgccgtactatcgttgtttatgaccacatacccgtcgaagctccaatgtcacatatccgtcgaagtcccaacaccgtactatatggtctcacttggcgggaggtgaatcgtccatactttgaccatgggacgatagcctcagggtgaagggggagagaggaaacaaaggaagcaccgaagcgaccgtctaatactgtaacatggtgatcttggcaaacaaaggtggcccgacctcaaactgagtttctaagttgcggtgttttagactccgttcgaatgttgcgcgtcaggccggccagaatcgttcgcctgctatcgcctatgcagatattggcaggggcaagcttccagctccaaattcttcgaaaataaacgcctggagttcgactattgctgaaaggccttgagtatggcagaggaggttggctgaacaaggaagatacaggctagttttcggtagtcggatcggatttgatccacggcgccttctctatttccccatcacattcgtccgtcagcttgccacccctcacacgaggttctcctcgtgaacaatacccatagaaggatgcagtatagtaaaatttcggtgcgcaagcatactacgaaagtcgctcggggtctggtacaccgcatgagtgatctcgcctcacataggtatataacattccggactagtggctctcagacagttcaaactagcggctcccagacaaatcagccggccgaccatccttcctgcccaggggcgccgaccgagggacgtctctcggtatccccagacatcctctctgtaggcaacgctaccgaactttcctcgggaataggttccgctggcgattttgatgcgtcttcctctcctggcaattttcgattcgcatagcgctcctctgaaggatcgccttgcaagctgacaacaacgctctcagcgtcaggatccacagaatcgaacaagctcaaatcgtaagattccccatgcgccgaatttattgaaccgtatgtctcccgatcctctcgttcttaatcctccaagccttgttggttctttggcttccggtaacccagacactttccggtgttgtcaaccaatctcgagaataaagacgagcagccggtcagtgcgtctatgaaggtctgtgacgacagacaagagggttcgtagcccgtattggccgattcattaggcaaacgcgcgtcgatctcgaggtcaccgtacaacgtctcgcttgctaggctggccatggctggggtaggtttgatgtgtagatgcggagtgaggcggggagtcgtgttgtcagacccggacgaaaccgcgagactcggaggtcaggatcttggctaaacattctagaggtatatatcatgcggatagagccgtattctcctttcatacgggaagggggaatagcacagcacagcagtgcatcgaccaatcgtacggggaaatcacgagattgctcatcgggccatggttccgtcctcttgcctgattcgaccggtgtcagcacatttcgctcgcaagaccatagcaggatgaacaagcgctcacgctgcatatggcgtcaatattacaagtttgcatatagactcatataccgttcgaggtgatcttcgtaggcagactctgaaaccgtcgcgaggcgaaacgtcaacgtgatcgactcgaaacgatttctcacgcgtgtcagtgggtttcgcgctgggtgaggctcttttttaaggcgggtgggcgggtggaggacaacgcgcttctacgttgtgtctcgtgttcctgtgcgtgtttgcgcttaacgagagcaaaagactcgcgaggaaaaaataattcgcccaggctcaggctcagggccagctccagcagctccagccagccagacagccaggcagtagcaaccttcggtacggagcagagcgagacctattcaaaccacccacccatctatcactctcatacaccacacaccgtacgcacagtcttgttcccctctcaaatcaaaagagcttcgtgtcagtactctctcgttttatactcgatcgatccatcaaagactcacggtccctgcgctaccttttctttgcgccgacaacagctcaacactactttccttttcattaccccttacccaaaaaaaagaaaactttaaaaaatgtctgccgaagacgtcaacaacgactcccagctcggaatcggtatcgatttgggtaccacctactcttgtgtcggtgtgtggcagaacgaccgagtgagttcatgatcgactcgggggagacggatcggcgaggagctggtatctgactttttccctctctcttgcctcctcgatcaccttgcgctccggttcttgtctgactacagggtaagtgctctttctaccttctgccctctaccttatcacagccagctcatccttgaacctcatccttgtagtcgagatcatcgccaacgaccagggtaaccgaaccaccccctcctacgtctcgttcaccgaggaggagaggctcatcggtgactcggccaagaacgtctcggccatgaaccccaccaacaccgtctttgacgccaagcgactgatcggtcgtcgtttcgacgaccccgatgtcaagaaggacatgaaggtgagcagagaccggtcctctgtgcaaagcgcaaggaaagtcgaaccgcccatactgacccccttgctatcgacacgcgcgcgcgtctgtagaacttccccttctcggtcatcgaccgtgacggtgcccctgtcatcgaggtcgagtacctcaaggagaagaagcagttctctccccaggagatctccgccatggtcttgaccaagatgaaggagattgccgaggccaagctcggacgtgaggtcaccaaggccgtcgtcacgtgagtgatcagacagtcgaacgctcggaagcgcatccggttcgaggtcgaccgatgactgacttggctgcgcctctcgaccgctcgtgatctctagcgtccccgcttacttcaacgactctcaacgtctcgctaccaaggacgctggtgccatcgccggtctcgaggtcctccgtatcatcaacgagcctaccgccgctgccatcgcttacggtctcgacacccagtccaaggaggagaagaccgtcctcattttcgatctcggtggtggtaccttcgatgtctcgcttctttccatccagggaggtgtctttgccgtcaaggccaccgccggtgacactcacttgggaggagaggacttcgacaacaccttgttggagcacttcaagcaggagttcaagaggaagaacaagctcgacatctcgagcgacgtcagggccgtcaggaggttgaagtctgcctgtgagcgagccaagaggaccttgtcttcggtcacccagaccaccgtcgaggtcgactcgttgttcgatgtgagtctggactgaaatgaaggcgtggaagctcgttcgggaacagagtcctgatgttgtgcctgttcgtgtgccttttctccacagggtgttgacttctctgccaacatcacccgagcccgattcgaggagatcaacgccgccgccttcaagtcgaccattgaccccgtcgaccgagtcatcaaggactccaagatccccgcttccaaggttaccgacattgtcctcgtcggtggatccacccgtatccccaagatccagtcgctcgtttccgagtacttcggtggacgaactttgaacaagtcgatcaaccccgacgaagccgtcgcttacggtgccgccgtccaggccgccgtcctcaccggtatgacctcggacaagaccgccgacttgctcttgctcgatgtcgctcccctctccctcggtgtcgccatgcagggtgacgtctttggagtcgtcttgccccgaaacacccccatcccctcgaacaagtcgaggactttcaccaccgtcgaggacaaccagaccaccgtctcgttccccgtttacgagggagagaggactgcttgcaaggacaacaggcttttgggagagttcgagctttccggaatcccccccatgccccgaggccaggccgagctcatctgtaccttcgaggtcgatgccaacggtttgcgtgagtacaagcgagcgtcccgagtgatatgggtcgagccgcgagactgatgtcaatatttgcgtcgatttttcggaatttcagtcaaggtttccgctcaggacaaggcctctggccgaaaggctcacatcaccatccagaactctgttggtcgattgtcgagcgccgagattgaccagatgatcaaggatgccgagcagtgagttgtcaggtgcatcgcaattcaccgagttacagcgactgattcgtctgctcttttttcccgcgacaccctcaggttcaaggccgctgacaaggagttcagcaccaagcacgaggccaggtccgacctcgagtcgtacttgcaccaggtcgagaccaacttggcctcgcccgagctcggaagcaagatcaagcgaggtgcccgatcccagatcgagcaggagctcgccaaggctttggagaagctcgagaacgccgactctaccggtgacgagctcaagcgagcgcagctcggcttgaagcgagccatgcagaaggccatggccggtgcccgttaagcgcgccccctcttctccacactctgccaacctcccccccaccttgcatcccttttctctcattcgccgacccccctatatactttttcctggctttgtaattcagtaaagagggatcgtgtgattttgccatctcatcaataacctgaaactcgtcggtcttggggacccatttttgcacgtgtcgtctgtccatgattcgaactgtaaaagcggtgagacccgggacccttagggacaaaccggggtcgtattgccaactcacgtccggctgtcgtcggtccgtcgcgcaacaccaatccactcggtagacaagggatagcctcccagacaaactctgctacgcacaagcgctggcgatgccgatcgatatgccgtttagcagggtatcgctaccataggaggtacccagtcaaagtcatccacatgcctgtttcagcgagacatgacgaaccgatcacggaatgtattcagtcgtacaaatacacttaatcatgagccgtctagtataagctttgttaattcccgtgcattacatatatatgtatctcctccgcaatccctagttcctacttgcaacaagctttgcctagcccattggctttagcactctcctcgatcgccacatttccctgcccatgattgctggcggctgcggtgaccccttggtaaagtttggactggttgaacttttgagtactcgcggggacgtcgttcgaaggcgacgaggtgaaaaagtcgaccggcttgagcgtgaccatgtgcgtctcgcaaggcatctaatcggggcaaatggcgtttcggtcagtgtgatctatcgactcaaggcgggatcatgtcgactcacgactgggaaatcttcgactcggggattgtgagtcaggccaaaggtgtgccataccaccagatctgtgttctcgacctgttttgcatctcacgttaatcgcggcatggatgagaagcgcacagttgacggctcacatcatctttccgagcaacccaagatctgatgccattcgcgcctccactgctttggtttgtgtagagccctccagagtacaactcgtcgtcttgatgcttggtcacccagacgtgatgatcggcaaactcggcacgctagacaagttcaaaaggcaggcagttcaggcaatgggcgcggaggtcaagctgcgactgaactcacctgcgccgcgatggaatcaggatgagccaacatgagctgcgagggggtaggcacaagcttgtatccaattggacggccagaaattggattcaacttgttagggttgatgctgaaaaggcgagacaccagaattaagcaagtctggcaaccgcaaccgaggcgataacgaacattttgaagattctgttcttttccggagcggcgtcaaagcctccagccgtagtgatggcggtcttctctactgtgtagcctacaccgtacaaattgttcagaggaggattggccttgttgaatgccatcggtaccgagtcttcctgaacgaccgtgttttcgtgtccatcgattgcggggtcgagtcggattgagaaaagatgctgatgattggtcgcaagcacgctgaaacagagatttagtcagaaatgattcgcagtggttgcccccaagaatatcgttgctcgttcaccctgggctgacaatcgtaccgtaaggtgacttttcgccaggcatgatcgctactgtcgagagaattccagtcgctcgagtctcgatggtgatatttgcagattgatcgaatctgaaaacacaatagccatcagccatactttcgactaggatagggagttctgactcacttccaggcaaaaatgtctaaatgaagacgttaaaggttaggttgttagattgtgcattctcttcatctcgcacagacgtacattcgtaatttgccctgtttcaagacgtctgacggtcagctaatgtaattttggtgtaacaacgacagtaacgtacactgttatgatgttttgaataacaaggacccgagaccgagtaatggaagggttgttcgtcctgaagttggtatgcttccagccgataccttcatcctgttcgtggatgcatactgtgcctttgtagtgctggggacccccagagctcgtaacatgatcgaagtcgaggtactgtttgcgaccccgagtttcgttcagcttaggaccgctgttcgtgcaaagcgctagtggcttacgtggatttcccccaaacagtcacatccaagttgcaattgattggcctaagaaaaaagaaaggctttagggattgaattacgcgttcaaacctagtggcttttttcttgcttacagtaattccagctcctgagagatcccaaagttcgcaagtctagtcagcagggctcgccacatgcgagatcgaaggtgacttgccgcagtctgcaaaagcaagggactctttcagcctgaattcatgatgatcctgcttgaaattaaactcaccaccgagatcaaaagcttgtttgcgatggaagggtgcctaatgataccatgctcaaaacgggtcttgccagatccgaatactactactacgtgaactcacgcgcggatcgccatacggtacggtcttcgaaagagttgtacgcgtcaggctttgcgctgagcaacgattcgtgatggatcgactcaccatatcggatatactcagcctgtggaagagctttcgaccttcgtaacggatgtcgctaatgactgtgccttcccggtagttgaacccgatatgcatagagtacttctgccatcgaatgactcgaccatcgagagtgaactgaacggcgggtaagcaatctctattcagcttgagatcacaacgttgatcaggcttatggatcagactcacactagcaccttgaggttgagagatgtggtagggcttgacatcgtctctgtatttaatcccctctgcttcacgtagcttttgggaatactcgttcgatatgtattgctcccaagggaaaggtccgtcaaggtcttgaaccgtcttggtgctttcaccgccaaaaatcggcgtgaacgcgatttcgtgaagcttcagagtgtctgccagcatgaccggaatgatgggaagcggcgcgctgtaatgacagctgtccggatcgtcttgaaatcgtaagtagcacatgaagctgataaaccgagggcagtcgtccgtggtatcggcgcctgcgcaaggtccgaaacgtcaacttgatatcctgtgcttcatactgattgactaaccatagatccaagcatcggcgacgaccgtggcgtggtccggcagtttgagatcggcgatgacctttcggaactctggatccctcaagagagcctcttctgccagattcatctcttcaccgtcggcaggaacatgatgttcattgggcacctcttccctcttgtccacttggcttgggcgatcagtacccgaagcaagcgtgacttgataatctatgaagcgctatatgaatatcgttgatgtggttatgacatgccaaaagtcgtcttaccataccacttcgcttcatcggtaaacttgaccccaaccaggatattggcttggcgaggcagactcgagggagtacggccttcatcgatcgctgcgtgccattcatccaagtagggtgccagaaccttcttggggggttctcgtaattgtatacctttgaaccacaagcgagtcccgtttgtatggccttccttgagctttgtgtctttgaagatgatgtcaacacattcctgaatctcaattgaggaaagggggtcgagaggatgatgggctggtccaggggtcgatcttgctgaacccttcaagccgaaggactcgaggagagaagtgactgtctgcatatgtatctggcggggtcaccgaaggaaatcgaccgcgctgtcttgaagtatagagactgtgttcgagcgatcaagtgcgatgtggccatgatcatcagttgtgtatatatagttgatcgtatgaatgatatcaggtatcccgcagcgcctgctatcgttatcgtcatgtgatccggttgatacgttcgaggcgattttggcgaggcaggcgaacttggagataagcgcgttttgagttcagtctatctctcgacttcatatcgcgtttcttgatagcaacttcgccgataccgataccgcgtataccgtaacgattccagatagcttggagtatatcaactgcaaatgatcgtaccgcatttgttgcccttcgatcacgagtcaaacctcgtcactcgatcatgaatcaggtgtcaatgtcacttcacgaaatgtcggaacaggccttcgcagacgacaaacgcggcaagggatcgattgttcacgattccgaagcgaacattgccatcaacgtgatcgaagtagaccaagatggcgtacagccggtacagttggccaaatccttcagcagcttggcagcctttggcttctgctttgccgttctcaacagctgggtggtgcttctggccggacttggagcgggattagcttccggaggcccaacgacctgtaagagcttttgagcaggctcttgcgacgggtcctccctgacacaccgccctctcgcacaaagtgatttggggcttcgtttatgctatcatctgtaacctcgccttgactatgagcttatcggaagcctttgcggtgtatccaaccgctggagggcaataccactggacgtccatatttgcgagcccaaagtcagtgggatagttccaaccgtgttgcctttatacttaagctgacgcgacattatgattgcagatctagagcattcttgagttggctcaccgctatgtgcaatgttggaggcttatgggctggtgtcgccacgcaggcatatctcgcctcaactctaatcgtcgtcatggcaaaagtcaacaatctcgattacgtgccgacccctgctcaggcctacggtatctatgccgctatcatcgtattcggacttggcagtacactcatatctggggtcaagttcactcgtactctcgattcgagtatgacttggatctccgtggtgggtctcggatcgattgtcgttacgcttctggccacagcgaagcccaaagcatcagcagtaagccagtcatactcgcgatggccataccgagctcatcatctcatattacgatcagagttttgtattcaccggcgtttacaatttctcgggctgggactcgacggcaatagcgtggttgatcgggcttctaaattcctcgttcgccttcatcggatttgacctgtgagtatgggcttcccgcgacgtgaaagaaatacgagaacgctcatctccacgtcaccttcagtgtgttccatatcagcgaagagcttcctgacgctaggcgcaccggaccgaggatcctcaacgcaacgattgtagtcggaggcctgacggggatggtttgcctgttgaccctgttgttctgcgtcaacgacattgaagcggttctcggtacggtatacgggtgcgtacggacagccgtgaaagtagaatcacttatgtagactgcgactgataagaacccgcttcaggttgccctttgcacagatatgcatggacgccaccggatctaggccagcaacgaccatattcttgctcattcccacttgcctgctcttctacggttctagaggatgccaattgaccgccgcaaggttgatgctcgccttaggtcgggatagaggattacctcgctcaaagattttcacaagggtcagatccggtgaaccgatttggggtttagtggtatcaactgtcgttcctttactggccggtatggtacaactgggatcgtccgccgcatttaatgctctgcttggaacggcggtgattctgctccaggtatcatacagtaagtcaagttgccattctcgtcatctcgttgttgaccgatccttgttagtcattcccgttatacttatactatggggaggaagagcgcaacttgacaagtctcatccagataggcggtccaatctgggccgttatggcacagcctgcaacctggtcgcctgcttcttcgtgcttcagagtatcgtcatatattgcttcccggcttcacaggtaagattctggttagaatccgagaaacctcgacgagtctgatagattccttttgcagccagtgactgcgagcaacatgaattatggttcgtctttcgcgtgctcacagccaccccgaccgtcgcgctctaacctgacgcaatcgcatccgctcagtctccgcattcgttgggggttatatactcatcctggtcatcttgtggcagacctatacgaagaagaaattcaagggtcctagcgtatgtgacctcttcgagatggcgaatatggttcggggagctgatcggtcgtatcttcagcatctcgacattgaaacgctgatcgagcgaaacgctgagcctaggagcgctctcatacgcgcagaatagctcaacttcataaagtatctcagtccgatcatcgatggatacctatcgtatcgcttgaattctgtagtatgtcatgccgaatccttcgccttgtgtatagctcttgcaatcatggatagagagcatcttttgaaccatttcaggtccgtgtacccaaaatgaagcgcgagaatctaagcgccgttcaccgaggttgcgttcggactcggccggggccaagggaaagaactcgtcttgtcgcccatcgaccagtgatcgggagtcatatccatccacattgaacggcagcatgttgatgtgacaaaccactcttacggtctcacagggtggaagatgctcagaacgttcttgtcgtgagataacatgcaatcgtcagcgggacccgctccttcacaaggccgtacccgtaccggctgtctcgtctgtcgaagcagaagaatcaaatgcgatcaaggtcggcgtctctcgtattaacaccgtagacacacgtattgaatccttgtgctttgaatacagcgaagcctacctgtatgaggtgtgagaaatatggtgcagaggtgcgtgtcgctctactgcgtagtcacattgctatctgaccgctccatggcggacagtgccgctacgtagctcagacccctttcgatgaacaacgtatcgctatcaaactcgccgctcgacatgccaagaaggccaccccatctgcggcagcctcaattgcgagctcctctccaggctacctcccggtcccagcaaggaatgcggaagctggacccagtacgcagccggaacgctcgtccaccctcgatatcctgctcgcgttaggtcgaaatactcggatgggagcgttctaccttcagcccacagagccacccgagtttttgcgtctcgcctttccggatgaagatgaactacgttgcgtatgtcccaggctgctgcaccggaaaagaccgttcgaccgacatggttcagcatacagatccaccactgtttgacctactcgcttagtatcatggtcgtcgatgaaaccaagaacccttgggtcgcatacgtggctccgctcttcttgtttcccactacaggcgccaatgagctttcggttgcggctctgcgatgggccatgctggctctcggtgcaacccacctctcgtagtatgtacgtgtgcgaggcggaactgcacaccgacgccggactgaaaccgttctgatcctggcggtcgaagcttacaaaagcgctcagacgctgaagaatggagacgcacccgaatgctagcgagtctctaccggaacgaggcggtcagagcgttacggactggacggcgtgtcccgacagagcagacgagcaatacgtttttggctgcgacgacaatcttgctcggcgtatcagtcagtgctgcgctgaacacttctagaggtattacctgctgaaagtcctgaatccgacagatatttgcggttgacaaagaatggcgtgaaatttggcgatacgccctcgcggccatccgggatcgaggcggtatcgcagccatgtttgttgagctagagcgggatacattggccggtatggatgttcgagcggactgggcgctgttacgctgtatcgttggacagttggctctcatcgattctttcggtaagctcgttcgcacaaagaaagcaggccggtgctgagcgacatcttcctgactcagccgctctcgctactggggccgcccccgtcatactgaatcacaaagctcagtggtgggaacgattgaacggagcgaacgatgtgagcggctcgtctactaggctcgagctgaacctctgacctaattgttccgttcaacatagtctgcttcagtcgaatcggtttctggtatggatggctgcttgatacgatgcatggcgtcgatcgcggaatgcgtttctcaccaagctcggttgacaattttggacgacggatcaccatttgatccacaggatgtcatcgaacgtgaactccttcagatgcggatcggggaagtgcgcgcgaaattggaagcatggtattacgacgcttcgacgttgacaaaggaggatcgaacccgggtcggatctttagccttgtggcacgcctgtcagatcctgctcaggcatcgattaagcggggaaactcgaacgggtgatgctttgcacctccacgcccgggctatcattgatctgtgtgtcgagtctggcgacaagatcgagtacctcaattgggtaagctttaatgttgtctacctgctcgtcaatgagcctgattgatgaccggtgactctcaatcccttccgaagcctctcttgatcggcgccagcgtgacgcagcaacaggccgaccgggacgatgtgcaaaagctgctcgatgtctttgcgtatcaatgctgctacgagatcgaagtgctccgccagatcatcgaggtcatgtgggaacggatggaccaggggagagacgacgagtctgtcggttggaccgaggtcatggtggagatcggatggcccgtcttgatcggctgagagagggtctttgagggagatttcaggggatttctccacagctttcagtgacaagcatgatttacgattgggggtgacatgacgtgccctcgggtatggtcatggcagcccgcatagctatagatcttaggtatagttggtggacagactacactcgggtagcaggccatagtcgtgaactagtgctcggatcatctcggtcttgacaaatgtatctcaaaaatcatcacgctattggcaggtggaaacggcctcgtggtcaaatctgtcggatccatcgacttgacgcaattctgttgttctgcattccgagcgcgggcaattccatctcgacacacccgaatcgcgtcgacatcccgatgttgacatcttcagacgatccagccgccctgtgacggtgctacgaacgttctacacagccgagaggagatcgtgatgaaacgaaaatctcgtttgtcgagcccgggttcgctcttgcccgaagccagggggagaaggagggggacgcgttgagcgggctcacgatgcccgtgcccgtgctcacatgacacatttagggtgacgaaaagggtgactttccacggactgatagcggtaagtggcttttgtttcggtcaggaggggtgggggggagctagcgagcgtgtgacgatgaccgatgtgagccagacaagtcaacaggcccgagggagcggtaccgaccgtggaacagcggaaccgggaggaaggaatatcatcatcgtcgtcggcttcgtctgatccaaacattccaatcgaccgagggggatcaccggcccttcgaaagtggatcgagtcccgaaaggagtcaaacgaacctctcctcgcccctatatcgtatccccttgctcttggacttcttttgtcatacgcgacggctttcgatgcccgtggccgacagtgtcgtgatgctgtacaggtcgtggtgaatctttatcgtagatcggcccagatcggaaggtctatgttgtatgtgcagctgcacagcacacatctcgtgtcgaggatataatagtctccaggatagctaaaggagtccaaggtcttttgaaatcccacgcgaccatcatcagaaccatagatcgtgaggcgcctgagacgagactactgcgacacatcgacatctatcacatacctcatagtacccgaccgacaacgtaccacattatcggcctcacctctttcttaccgcaccaccacgactctgacaccatgtcttcttcattcgacccttacgcctcgggatgttcccctggcaattcgagctgtaactataacgtcggatccatcaacccgttcgagggcgacgtcgaatacgatttctacgggtacaacatccagctatataccgctgcgatctttgtagccttttatggactggccacgcgtgagtctttgatggtcgtcatcttccatcgaacatcgcttatgaatgatcccccccatgctaccatacagtcgcccatctcgtcctcggcgcactttcccgtcaaccctggaccctgatgacctttttcctgggaaccctcggagaactcatcggctggtccgccaggctcatcgcttccaagtcgaccaaatgggatccctcggagggtggttcgtgggagagcagtcagacggcgttcatggcccagatcgcggtgttgatcttttcgccagcgtttttgcaagcgggttgttatatcgctttggggaggatcatcccggtcttggggtacgtactcgtccgacccacaataggggttccttgactcgacgtgggacgctgatccggtcgagtggtcgtctttggggttgtcctttctcggtgacagacctcgttacacgttcgtccatcctttgtcctacactgtcctctttgttgtgggggacatcatctcgctcgtcgtccaggcgatcggaggtgggcaggccagcgcggcagtgaccctagaggaagccaacaaggggggctatgtcatggtgagcgattctcacgttgggtcttgctcactcgtgtgccaagtagctgaacagggcgtcacgatcgacttgacagctcgggggtgtcattgcccaactcgtcatcatgctcgcctttatcctggtgctcggtacctttgtctggcgactccgaaccgatcgaccttgttcgaaacaggtcgaactcttcaaatggtggccccagcccttacgaaccaagagcttcaaacgcgtccaagcgggaagaggaggatctttcgactctggcgtgatctctcctcagtccagcaccggtggggtcggagaaaaagtcgtcgtcccctcggccaagaagagaaagacaaagttcggttcggtccaagagggtatggagtacacggacaaggagatcaggggagccaagatcttgttgggggcttgcgcgctggcgacctttttcatctttatccggtgagtccccttgccttgcctgctcctccgctccgggtgacagcccgtaccagctcgagctgatcggggtacacgtatcatccgtgttttacagatccatctaccgatccatcgaactggctcaagggtggaacggcaagattatcgagaaccagaccttgttcaacttgctggatggcatgttgatcctgctcgcgaccttgacgttcgtctttgtccacccatggtgggtcaccccgaagcgcaaggacgtggtcgaagcagccgcatgaggcgagtcgagacgatgcggacgaggcagtatatatagacagcgcttgcaaagaatacgagattgtgaattgtgtgacgtgatacaccctgtagtagcttagtagtagtctttagagtctggcagaatgtcaatgaccggtaaatccgggttttcgctgtttccggaatcagattttgcatccgaccactttggttcaaagtcaagtcccggccgagagaagcgaagtcgagttgccggtggtgggtgaccttggctaggctaagggatggatgggatcgcaagggtaaatacaggtcatcgatacaccatcctattcagacccgccttcatagccatagctcctactcaaagctatactacctgaacgctcactcctgatgctcatcggatctcgcttgtcgactcgattgatcagaccatcgatcgttcacagtcatcaactccctatcgtcaacaggatcgtacagaccatgagctcgtccacgttggcaccagaacagagcaaagaacatgctgtgagtcggtatagccaggcattcacgcaccctttccctgctgatctcatcatatcccaccgcacccccttccatcgcttcgtagcccgcctcggtcctgttcgaatcacaaggctcgacccggacttataaactgaaccgaccgaaagctctcaactcgctcgacccttccatcgtatggcccttggcggaaaagattaaagagtggaagcaagaccccgaatgcaaggtcgtcctcggggtgggtgataatcgggctttttgcgccggtggggatgtcaagggtatgtcgtcgtcgtcgtcggcgtcgtcgtccttcgtgatctcaactcgctgacatgtgacgatcaaatcgatagccgttgccgtcgagacccgggagggacgtttagatgaagccctcgaattcttcaagagggagaacacgctcgattacacgctcgccaagttggggaaaccttatgtcgtcatcatggaaggaatcaccagtgcgtgcccgcacagaaatcggtcctagacccggcaggtctgactgacctgatccgcgccccggtttcgtaccattcgttctgatcgcagtgggaggaggtgcgggattatcctacccggctcctttgagggtggccacctcaaccaccaactttgccatgcccgagacggccatcgggttcgcgcccgacgtcggagcgtcattttatctcgcccagctagacggcgctatcggggcttatctcggtcttgtcggtgagagcgtacatgggagggcagtctagtgggtgatggtcgattgatcgaattgcggcaaagtgtcaaaatgaaagctaatcatcctggtgcggtgcggattgatagcgaattgggtatcgctacgcactacgtgccgcaaaaggccctggcgggactggtcgacgagatcaagaacctatccgacccgacactccctcgtctggccgcattgatcaccaagcactcggctcccgctccaccccacccacgacaacttccggaagatcccgcagagtactcgtccaaagctaatcccgaggccatctccccactctgcggatcggtgaggaaattgctggaccaggccttttcccagcccaccgtcagcaagatctacaaggtcctccgagaggctatcgctgatgaacaaggagcgacgtgggataaacgggctaggcgatgggcagagggagtcgtcaaggtcatggacacgaggagcccgacgggattgaagatcgccctcggaaactatcgacaggcaaaaaaggaccaggacttgaagactcagttgaaccgcgatctggccatgaccacggcgttcctggtaagtccctcgagagtcaggttcgtgagcaccaaaagactgaacccgaatccgacccgtcgcagtcatctccgactggcgacatggtcaacagtatcttccacaaactgatcgaaaagaaaaaagagacccccacatgggtccctgcgagcctggacgacccttcactcgacgagcaacagatcatgaccacctggttcgaccgatcgaaatctgatgtgctcgccaaggcgccaatgatggacgacgtcgaagacccttcgggcaagcacgatcaatcggcctggggtcgttacagggcatgggggatcccgagcgaagacgtcgtcaagtcgtacgtgaccggctcggcaaagggatcaggagcgttcgccttgactgaagaacaactcaagcagaggattgtgaggcatacggccgataggttcgagatcgatcccaaggtccaggtcgagtgggcggaagggatcagggaacgcgtcagggatatcgtcgaacgatgctgcgagatcgaagagggtcacgaggaaaaataccttcgatggaagagttatgcaaaggcgaaattgtaggcagcaaatgtcagatgtgaagtattaacaagatgcaatcagtcagaaacggtccggtcttcgacgtcgacgtaatgccatctgcaccgttcgacgtgtgtacgttactgatcatcctgactccgatcaatgttctaggttttggcgaacgataacggcagcaagtcgtagaagtagtcgagtggcgcgttaaagtgtcgataccgttgacctactccgctctgagtcccactaccaagctccggtccctggacgtccgacaaggcttcttccagccgttccattgcgatgagccgctgctcttccggattggcgttgtccgcaaggagtcctaggtgacggcaactgattctcttgcgcatgctaccatatccctgcatcataggaaaaaagcgccgtgtcttgggagtttcaaatctggccgtcttgttggctaaaatcgaaatggattaacgtcagcatcagaaagcttttgggatcgaaggagttcagacttaccgattgcgatttgcttttctcaaagcaccagacttctctgctcttttatatactgagcaacgtgccccgaacagccttacatgtcagccatgagcatagctaacctttagtccgcttgaacgtccagggcactgtgtatggtgaatggattagcgggggcgtcgactcgaggtgacttcgaagatttctgctgaagaaatcgtctggtaaacgtggcgtgcgactcggcgttcaacgtgaacgttatgtttatgccagaggtatgcagcgatcttggcgtttcaccctcgaagcgccatgtagcggcaggtggcaatccttgtagccaaaaatctgctgccccgcgggatcccaatatacgtcgccatctgcctcgggactgctcgttatgacgaaagaggagcaccagagaaggagaagtaaacggttgcttgacacgtcggcgtcgtagagtcatttagagtgatcagttcgaggctcacccaagaacatgaaggtacccattaacaagcctctcaagtagatcattgacgagaaacgggcgagttggcccgcccgactgacgttggtgtcctcttacggttacgagaaggtagcaattgcataagggtcagctatgtggccttacgagcaaagttagacttgattattagatactgtggtaaggtgtcgttatcggtcgctgatacgtttgtgtacatttcgaatctgacccccgcctatgcctcgccgatcgttgtctgaaacattgtcgagcgtcgtctcgcccgccgtgccaagccatcatccagcttgactgtatctggcgcactgtctgtcgagctctgactcgagttgagtatgggttgaagtggctggcgccgcgaaggcgaatccacgttgctagcctctggtgtgcccaatcgcgctcgacgacgagacgagatcttttcgatctctccgcctagcgtacccatttgctccttgagaatcgggagctgcagtacgaggttcaactcagcctcgggcaattcaatctatgcagtgctcgccgtcctactcacctcgttatcactcgcacctcccatctcaccctggccattttcgctcaacgcctcaacgcgcctcgactttggcaagacgctcttgcgacgcatgaccccggcgttgacaggctccaaattactcagcccgtactgttcatcgcctcccttgagtccagcttcgcccctaagcccagcgggaataaccggaacgttgagcacttcggggtcatccaagaccgagtgagacaaggttttccgtccgggggtgttcgaaggtgttgtgcttctcgcacgcatagtcccgctggtcgtggatggccccgagacgtatagttgaccgctcgagatcgactctggcttgcgcattttactataaggcggtctcgactcgtcagctctgatccaacacgcctgacgcggctcgactcacaagtgcaggtttggctctttgtagttcacgctcttcctcgctcgcctttgcctgccaccagtttcctcttcctcccggatttcgagctcggacggttgagacgtcgtcaccaccacgataggcgccacaggtgggccagtcgccgccttggccattcgcatgagggtctgctcgtgaacagccgcgacttgtatgggaggggtcgctgagaacgaatcgatcagcgttgattttgatggtagtaaagaagcgtcgaatcggctcaccttctcttgtggcacgtgtcttcggctcgtctcgatcatccacactgatcttggtttcagcctcaataacagactctgcgacctctgctgcagtctccaacctcaaggccagtccgcattccacaggtttcaaagaccgtcgtttcctcacaacagctttggtcggcgaaacgcccgcattgtctttccccctgaccgtttcgactgcaataatctcgtcgtcctgcgtatcctccgcataattcatcctagcagccttctttcggggagatcgtcggacgggctcggtagtgatggatttggtcgacgggcccgagatctcggactcggctctctttttgggcgacttgcggacgtcaaagatgtcgctcggaagggacattcccgaaggacccgtattggacggatcgaacgggttcgacgactcgttggcgacaggtcggaaaagaccactctgtcgtcgtccggcaggcttggcagcgattggtttactagaagtggtaattagactcgggttggcggttctagtcctgaacgagtaagtccatcagtacctggagcccctacaagttcgaacatgcaaacactcaccgttcgaccggaaccgcagcttcgaccaacaactcgacctgcttcaaatcatccccagcctcttcgatcccttccgccaagttctccaatgatggtttacccgctttcacgatggctggtcggttcaaccaggtttggacctcgatcttcttggtagccggttcgagtccccgcgatcgggtacgggtattggtggaccggccgtccgaggggtctgttgaggaggaggatggttgtgatgttgttcgtcgggatgaagatgaaggtgaagatgatgataggaacgatcgaagctgggtaatttgaggaatggcgagaagaagtacgtccagggcttgcttgacttccggctgtgaacccccaggggacaatgagcaggactatcagtcttgttcagctaaatcatccaagagcctcgggactgacgttgtttctgatcttgttcgctctctctttctcccttctcaattcctcggcaacgatggacttttcgtgtcgaatgttgataatctccatttgcaagtgggtgttttcgtcctcgaggttccgtattcgcatagcacggtcggcattggttctggcaagcagacggcacgtaaacctctgatctactcatgctgacctcgtaaatcgaccgatggaactcacttgatgatgtccctgttctgttttgaatgtcttcgcttgtctacggtatcgacgcgggaaatacggtcagccggatccacactaggcaacatctacgtcaaggactaccccacgtacattcctcgaatgcctgtacttggctcggggtagcatccatgttggacgatccagcgatccgagtgctctcaggggcggtgactagagcaggaagaaaccgtttaggcggttgtgcaggtattgcgggaatctgagccattgtcttgcaaagaaccgaggtgaggacgggcgagaacgggttacaccgtgccgcctagaccgggttcgacacagcgactatttcagggtttttgagatcacaagcttgttcgcagctccgaagtcaccgtagcctctgaagtcttactggattgctatcgtgcgagtgtggtggtcaaggcgatgcttgatcgagttgcaggggtcgacgtctcttggtttgttgtgacgcgtagaaggtcgatcaacaacagacgatcaacctcgaccgagcacatggtcacgtgaaaaggatacaggtcacatcgactcgctacatccttcttgacggttccatgccaacatctccgatccttgataaatctatgccatatggatacagaatgaaagtccagtgtgtccgtagtatgaaaatatatgccatcatttgtccttcttggtcacgctcgcgctggaagcaggtcgatcggctccgagaccgcccagcccgaccatgcccaccgccatctcgagcaatttccacgaagcgatcaaccatgccaagctaaagaccgagaatgaaagcaggacgttcgttacggggtagatgtcgggatatcgaggcgggggagagaagaatgcttccgagaagtggtgcaatacgatgaacgcgtagacgatctgtgttgcgaacgcattacgagatgtcagcgcggtctagtcgccatacaccagcatagacagtactgacgtagccaaaccacctcattttcaggtcaaccaccttgacaggattatagccgacgaggaaattccagccgagcgtccagacgatgtattgcaaggtctgatcgtcccgcttcaacagagggtacatgctgcacatcaccaaaagtcagttcgacgtcggtagatgcataacggagcaaagtatgggaatcctcttgctcacctgaacatggccacgttgaggagcccgacaatcccatcccacacgaagccgtccccctcgcccttttcgccgagcagcatcaacacgctcaagagcgggaccagaacgctcttctcatggacctggaaactgaacaagaaaaaggccatggacgatgtgaacagcgctagtggaagcagcggtgcagtcggcggaagcgctgaagcgggtgatgaggtcgtgcgagtcgacggagcggatggacatcgcaggcgatagctcgtccagaggaggatgcccaatgtaggcgcaatcccgacgagggtagtcagcgtagcgagctagatcacggtcaacctcgagtcagctggaaagaatccgaacgtctctcgcgcgacacctcgcttcgttgactcgccttggccatcgaccccgcctcgaaccagttcttccatttgaagaccacgttactcgcacaccaaaagttggccaccttgtcctcaaagatccctcgctggagggggaaaatgcgttccagcaaggtcaagggagctcgggggaacggacgcagaaaagggaaaaaggccaagagaaaagtggtcgcggtcgtcgcaccgatcttgatgaacaaggtgaggctagcaagaggaaccggtcgtcattaggtttaaacctcgaggagaggacgctcttgacctccgacttccgactcacccttcatccccgccgagccagatgcatttgccaagcagatacccgaataccgccgggctccaatatagccccatctgcttgaacaacaagctcgacgagaaagccactgcgccccagaggtcgtcaccacgttggaagaggtagattgcgagcagggtcatggcgatcgggaacgaattgtattgaaagtggccattatcgatcaggatcaagcaaggttgaagcaagatcgagagcatggtcacgatctgcccgatcgccgaccagtcaatcgcaagtcgcttggctgaaacagtggaaagtgacacgtgactcaccctcgtacgtttactcctcgagcccacaccccagcctgaccaacaccacaagacgacgacgggccaccacgagatcgattcgagcgcgaggacggtccatcgcatgtacgtcgtcaatgctggggattctataccccgggaagatcttccggaaaaggaattggggagcaggtagtgtccgctgtgaatcccccgaatacgaggttgggtagggtgagcggtcggtggggggagtacgactcttggaaacaaggtggacttgcattttgccgaatatccaactgatatacgccgtcagaggcgggtctatcgagcgatcgtcatatcagcctttcctcctctcctcttggtcgaccaacaactcgtcatcgaaccatttgacgaaaagacatcagcccgagagaagacgctcggactcacaatccaacctccaccaatcaccatcatcggcacctcctacttgataccacctcagtcccatcggttcgttgatggtcaggtccatccagaatcgctgagcttcgaaatcgccgaaccgaggggaactcgctcttcctactcagcatcgagggcagcatccagagtcagaacattgacgaccgacgggacgagctcaggggatgatggaggggaggggaaggagggactgtatgatgatgatgagggacgtaccagagtatccaccgagccctacgagccatttgacaagcccgaccagactcagggagaggccgatgatggcccatgaaggtgcacccagatcgacggcgaggaacctgacgagtcgacgtagcggggtatcgacggtctcgtctatccggcgagatcggcggcgtttggatgtcgaggttgagagcttggccggtttctgttgagacgaaatcgaggtcgagttggggttggggttggggttggagctggagggcggtcggagatggtccccggtgttcagggtaaaggagttccgagggaatcgttgtgggataggagcgaggatcgcaggactagccggcctgacatccctcgacccgttagagaaagccggcgaaggcgccgtcgtaggtcggtgctggtagttgctcccactatggctcgtataattgttgctccctacgaggctcccgctgaggatgctcgtacccccgaacgaactgctcgagatctcggattcggcatactctccatcctcaccaccgtcccctcctcctcctcttggccggggtctgaggtgtgacaagtacgggttttgcgtatacccgagaggtccatcgggatgtcgaggttgttgttgttgttgcccgagttgacgttcacgggacgctcgacgctgcgcatagggttctcgacgggtgtggggtggaccgtgtgacgtggtgtatgatattgtaggtacgttactcatcttcctagatctgccaacggagcagtacctgggtgggtagtgctgtgtgtataagtatgggtggatgtagtgtgtagttgtgggtcaatgacatttgtgtgtttgtgtttggctcgtggtcatggtttgaggagcgggaacaaccgaaagtcaagtcaagagagatgacgacgaccccaaggagggagtcagtgacctgcactactactcttatagggacaacgctccctgtcatcgactcatctcacacccatagatcgtcagctcatcgtccaagatcagcaggtatctcataattcaccgggacgaccagcaaattccagatcaaaggtcgcaattcgtacccacagccgacctcttttgcacgttttctatttctaggcaggaaaaagttttcctagttcgacctagaacccggatcgccaggcgatcaattcgaacagcttcccatttgagagaaagatctgcgccgaccaggaggatattgaacacgacacccgtatcgcccgctccatcatgtcaccctcggcgacttccccccggttcatcatccacaaccctcctctcccctcccgctcgtccgccaatcccgacaattcacagaacatcctctccgacctaggtaattcacccagcaggccgttcaatatcaataaccccaacacaccgggaggaggatccgtcacgtccaacccgagggatatcccacacttggatatccccccctcgggtaggcccggggcgaggagttatagtcgaggggaaaagggaatgagggagagggaggccgatagagaggctgatagggagagacagaggttgcaggatatcgattcagccaagagcatgtgtgagtggtctgtcccctcgatatcaatggagagagtcgtacacactgattgacgttcattcacgccggcagcacgggctaggtccaactcgatcgcctcgcccgaagacgccatcccacccctgatgaaacgggcgctccactcgcacggcaggtaccccaagacctcaccgatcgacgaatcccccttccccgccctgtccgagagggaggaagccgagatggaacacgctcgacgggggtcctacaccgagaacgtggacgacgacgatcaggacggatatcccgtccagggtgggtcccggggcagaggtgggaatggtagtgagatgggtagcgaggcggacgaggacgaggggaggatccggagtgggcaggtcaggcgggatagggagagggcggccagggaacgcgagagggaggaagaagaggaggaagaggagctgaggatggccatggagcgtcgactcagtcacgagagacacttggagagcgactcgatcatgcatgacatgggactcggggatagacgcggaggtgggaacggcaggagttctcccgtgaggacgatggccagtcatttgatgggcgggatgggtacggcgaggaaccatttcgacttttcctcgatggacgaattcgcggacaaggagaagagggtcctcaaggaagcgtatggcggatatcacgatgcatatggcgccaacgggatgcaagccaagtgggacggcttcgaagaggaccctgcgacgcaaagcgtacccggacaagccggatccagagggtcggtagaggaatcacgatccatcatggcaagacacagcgaagaggcgcaggaagaagctcctcgtgctggggttcccgaagccgacctgatcggtagcgccaacggaagcatgcagagtaacgggaggatgatcggcggcacgacgatcggcgacgccgagtcggtgaggatctcttcgcctcccattcagcagcagcacctgccgaccaacgagaatggagaaggcgatgccggggcaggcccgtttgtccgccgcagacaacgcaagacgtctcagtcgcacgccgtctcgagcggaacgagacggcaaggtcgattggccctgttcgagggactcggtggggcgttcataggcgacggatcggcgagggacggttcgttcagcgtcaacatgtctccggacgaccgtgaaggtcccctgcgcggactcacttcggcactcccgacaaaggcggcgagaatgaccaacaagaacacggtgtttggtacctcgtcgggtgcgggtggtcaagagaacgccaaaccgacagggtacgtcgattaccccgatggcggtcgagggaatggcgggggtgagcgaccctaccgattctcgttctactcgaacgccctccccgcgaccatccacgcgaggagtctgagcgagttgccctcggatggccagacgtttgaagacttgttcaccggtcgagaggcctttggcggcaacgcccccgcgtcggatcagcgacactcgggatccagcgacgccggcggattcaaaagcgggagcacgagcccccaaaacctcaatatgggcgacctccacggatccgcaccgaaccccaagctgagcctgttggcgaaagctacggccaaggcgggtacgggtgggtcgcctccgatgaagggacagactgacatggaagatccggaagcgaggacgtggtggttggacgtgttgtccccaacagacgaggagatgaggatgttggccaaggtgcgcgcgaggacgcctctcaaaatttcgcgacaacgtgtgactgatgataccctgtcgatccaggtctttggaatccatccgttgacgacggaagatatcctgctcgaagagactcgtgaaaagattgaactcttccgaaactattacctggtctgtttccgatcgttcgatcaggacccttacagtcagacgtacctcgagccgttgaacatgtacatcatcgtctttcgcgagggcaccttgtcggtaagtcgtctcctcgtcaccttcgttctacatgccgtgacagcaccactgacccgacattggcgctgcagttccatttccgtgggactccccatcctcaaaacgtccgacgccgtatcaagtcgctcaaagactacatctcggtcacctcggactggatctcgtacgcgctaatcgacgacattaccgatgcctttggaccgttgagtcagagcatcgagtacgaggtagacgggatcgacgagttggtattgattctgaaagaagccgagcagagtgacatgttgcgaaggtgagtctcgaactcgagcgcaagtcgtccgtgacggccgctcagacgttttccttctcacgtacgaccgcgccgccttgttcagaatcggaacctgtcgtaaaaaggtcatgggtctccttcgactcatgggtaacaaggccgacgtcgtcaagggtctagcgaaacgatgcaacgagaactggagcgtcgcccctaaatcggatatcggactctacctctcggacattcaagatcatctgatcacgatgacccagaatttgaaccattacgaaaagatcttgagcagatctcattcgaattacttggcgcagatctcgatcgagatgacggacgcgaataatcaaatcaacgatgtgctttcgtgagtgctggtcgggtgaccctgagcatacaggaacgagagtgaatactgaacggctctgcacgggttgatagcaaattgacggctctgggtacggtactcatgtgagcaacaatcctcctctttgcacgggaatccctttcgctaacgagcaagtcgcattcgatgacagtccgatgaatttggtgaccggtctatggggaatgaacgtgcacgtccccggacaagatatcgaatcaggcgtgagtgtcaggtattcgggtccggctagttttgcttgcaccgctctccgatcgcgaggctgagccgaacgatatctgcccccgcgctttggttatagtacgcctggtttggaggtatcctgggtgctctggcgttgttcgccgtggtaggagcttggatcacggtacgttcagggtgaagggcactggctggtattgggtgacgagctgacagtctcgcgcgccttgcagctccggattttcgttagaaactaggcgtgtccccgtcgtgatcttttttcggtgtttgctggttgacctggggtttcctgtcatctcgacacatatagaggtagaagttgtgctctttcttgttatctggggataatcggctgtatatgacatgactgtattatacaatctctttcaaacattgtatggtcgccgtcgtcgtcgtctcgagttggttgtcacgtgaaaaacgactttgaacttcaaacgcgaatgaaacgagatttctcaaatgagcaacatccagccaggaccatcatggagaaggacatggggacattatcatcatcgtcaggtcattcacaatcagctgttgacaccaactgtacaaggcaattcagatcgtgcatctctacagagttcacgacacatttcaatttccccctcaaaaaattcaggacggcatccctaaccatgtcgcaaaaatctaaaaagggcgacccttcgtcccgcgccaaatcgacatcgaccctgaactcggcacccacccacacccaacccttgcctcctcacccttcgctttccagcttcaacgcatcgaggacgcactttgccgccgttgtatcagctggtatcgctggtgggcaacgcttgcgatgttgggatgtcgagaggagctcgatcgtcaaggaatgggatctgccgctcgacgtcaaggaggctaaacggggtgccagggcggtcttttggacgaagatgagcaggtccgctttggtcacttcgggagaagcagaggctgaggaagatggttcgtcgaaaaagaggagaaagcgaaagagcgcttcgggtcaggctggatcgggtgccggggaggatgacgaggtggaatacgtcgtcgtcgttcaggcggcttcgttgctttactacaccgctggccaggccggagtgaaacccgtcaagatcgtccccctctcgacgacaccgtcgagtgcggtcgctttgaaccggggtcaggaacatcacatcatcactgtctcttcgacctcgctcgaaattgtcgaccctgccaccgggtctgtacaactctccacccccttgcccgacggctttaccccggcctcgacatcgacatcgacatccaccccgatcgtcatctctgttctggacgactcgacggaccacgtcaacatcgccatcgcttccaccaacctgaccgttctcacccttcccttgcccctaagcacgtcctccaagggaaaagtcgaatggacccgcccgcaatccatctcgatcgagcctatccggacgatcgtggcattgcctctcgaagggacgaggttcatcaccgtcgaggaggaatccagggtgggcacggtatgggccgtcaccagccccactggctcgcaggaacaaaacgtcgagacgatcgcgaccatcccttccccctcttccgaacccatccacaacatctccctcgcctcgtcttcgggatcagacgtcgaggtcgagatgtacgccacgtcgctctctggcgagatcagcatctacagcttgaccgcctcgtccttcaccctctcctcctcggcagagcaggaatccgcagggacgagcaactcgaactcgttgtccagcaagaagaagcgatccaaaaagtcggcacccgtcgccgccctcaaacccgtctccaaggtctcggtgatcatccctagtcaggggaacgaggacgtcgtcatgcggatcttggcctgcgtgagcagcaagagcggcagcaacagcgggacggacgagcaggacggagccgaggggatggatgtggatggtgagcagcagcagcaggaagaggtcgtcgtcggttggatgggaggtgtcggacgagtccgatgggaaaagattgtgagtcgagcgtcgaccatggtcgagatcagagatggtccgttggctgatagatctcgttggttctgcgctcatagcgataccgggagatcggtggagggtacattcccgaggtcgtggtcaagagaagcggacaggaattgatcgccagcgagtctgccgagggcgtgagttcaggatcggaatggcgcacatgtcgagcggcttctgatatagcgcgtcgtccataccgcagaccatccccttgcaacgattcaaggaatcgacggcgggtgctaacaacaatgccactcgagcgctgatgacggaggaggaaaagaacctcgctcagaaagacctcgagttgcccgtcgagggagatctcgccgatttgactctgggcgaacggttggctgtcttggaacccgatcacgcaccctccggtgccaggtcggagcgtcgagccaggaaacccgatggtggggatgccgatgatgtcgaggaggaagaggaagagggccaagatggcggtcaaaagctcggacctcagtcgactcagtctttgacccgattgttactgcaagccttgcacacctcggatccttcgctcctcaccttgatcttgacttcgccccagaactcgaccccgggtatgatcagaaacacgataaggaaactgccagcatccatggcgctgcccttgttgaaggcgtgtgtagagaggctcggaaagggacgagggtttgaaaggcggggcggtggacgaggaggtggcctgagcggcaaggagggtggttgtgtggtcgcttggatccgaggagtcttggtcgagaggggcagcatcctgatgaccgtgagtagtcgtcttgccgttcttggcgagcatgaccgaactgaatcattgtccgtatctgcagatcccttcgctacctgtacacctcgcttctctctcgcaacttttgcagagccgactgcaattgcacacccctcttctgtctctatcgggccgtcttgacctcgccttggcacagatcgagctccgaaaatcgcttgttccaccaaaacccaagcgacaaggaactttctacgtcgagggtgaatcagagaccgacgacgacgacgaggatttggatgacgatgaggatatggacagcgacgtcgagatcgagggcgacgaggaggacattggcgaggtcgaagacgttcgattggaaagccgaagagagaccgagagccgaagcgccggcggcgatgatgacgaaaccgatggcgagattcgcgtgcgagcattgaacggtcgccagggcaaggcttcaagagagttgctagtagcatcagacgaagagtgagtcacggaacagcttgtcagtcgcttcgagggggaagctcataacgcaatcgcctaattcagagacgaggaagaggacgaagaggacgaggacgaactggacgatgacgatgaggatgatttcgacgaggacgatgattcggaggacggccgaccaagagggctgatcgacgacgaggccgatgaggcgagcgatgatgaggacgatgacgaggacatggaggagtaattgcttcactactgttccaaatgtctttgcacctccctgtatcaattgtacccgtccttccatgctcatgcctcatcataacagcatatatcgtttgttgcctagattaggagaacgggaacacagccgcttcacggttgggagccgctgaggtttgcgagagtgcgaattgattcattataattgctgtcatgtgcttgccaaatgcataactcgtaacaaagtcgtaagaggtcattaaagtaaagcttccaggcctgagacatccatgacaggaagacccgaagctcgcgagctcaagtcggtgcctagggcgaccagtcgtttgaactcggtcgttaggggcaaatttcgacgtctttccaaatcctgttccgccaagtggtccagtctgaggacctcggtctgtgatggagcgaaccactcggctaattccttggccacagcagcatcatagccgatgtggctataacgattcgcgactgcaatcttttcgactagagtcgtcgtcttggcccattcctgcatgccctccagccgttgcagtttttgatccgacaaagcaagggggaaccgtatgtcgaccaggtgcaagagcggcaaggtctccgtagcggcaagtttgaggtcccagtcagatttagagtcgcagtccttaatccgtcccagcaaaaagactgtctgcagggtgatgtaggccgaccatcccggcgtctggtgtatgcgttcggctagagtgtgggccagatcagggttgacgagcacccagctcggctccagcaaaacgattccgccttgcggctcgagtacacgggttgggagccagctgtccacaggactgcgagccggtacggtgggtccgcataaccagaactcgcatccattctcggcaagactccgggtaccgcgccgatgttgtaccaacgaaagtcccgcttgatccagaataaccacactgggagattggtctgcctggacaacgtttgcgccggcccccttcagtccaccgtcaatagctggtcggaacatgtccgctaccaccgcgactttcgttcctctgagcgtgttgaagaacggtgtggtaaagcctaggctgccgaggatggtgtcgggatgtatatcgtctgctcgaactgcctttctcatcacgttgaaagcacccaaaacttccttggatgaggtcgcgctcgttccaggggcgaaaccgatgaatgcgaccaagagaccgtggttctgctccaccaaatgagccggtgtcctgatcatccgtgcaaagtctgacccggtactgtataagatcgcggtaatgttcggctgtaccgtagccgacgctagctatggagcaatgagaacaaaaatgtgatcagaaaccgaaactgcgacgtcgagctcttcaacgttcggttcccttaccccttctcgcagatttgggttaccgagctcgcgaagaagctgccccagtacgcggttcccatgccctggctgcacaccatcagccacatcgatcttggcatgtgccagaagagctcttttggtcaagacgttgtggatgacatcgagcgacatgaaacgactaattaccaactgctttgtcggcctgacattatcgaaaagatcgttggcgttggcaaagggaacagcgggctgaactgtcaaattcgagatgaacagattggtcctcatgctcattcccggtaaccttatatccacctgacaagggacttcgaaggtactcagccgattgaccggccgaggagccgttcgtacagctgttgatcgccacggatcggaggccgcggaggccgcaaagctcgcaggcactggtggtcgagacgcggccgatgcttctctgttgactgcagcgaccgaaggaccagcattagggccagtgtcggcagctcgccttggcggtggagctgcaacaggcatcgagctcgaggctgccattggtttcgccgcgagacccagacgcggctccgggttgacgacctgttttgtgggtggtgcagcagccgcgacggatacgggtgcaattgcggtcgggggtgcggatgcaggaatcagtgccggtaacgaagctgaagcgggagccacagcagaagttgacgtcgtagtcgaggtcgaagctggaggaactaacgagcctggactttgcgaagcagcctctctagcccagattggcgcaagtttggtgtttgcaccgacagccgtcgtttgattcgtcccagtttgcgcctcttgaggggtttgatcgtcgaccgcatcctcagtcaagaagaggggctgttctcgtggtttgggttggggtggagtgatcgttgcttcagcccgagtcggtaaaggagcccaagacttggctgaagcaggttccgatgctacagaacctgtcaaaggtaccgtcggtattgccgaagacgtcgtagaaagtcccgagccggttcccgacccaaccgacgtggacgtgactaatggcgcaaccattggacgtgcgcgaatcttctccttcgtaggagcgaggtcgagaacagtactcaagaccgggcgcgttatgctgtcctggtccgtgattttcggcgctgtcctgaccggaacctttcttggttgcactaaagacaattcgtcatccgagtcggagatcacgacgactctcctccccctggaaccattaggaccaacgttcgccgaaatcgggttcgacgtggtctctgaggtcggattcgacgtggtcgcttctgtcaggttcgaaatggtcgctgatgtcgagtccaacgtggagggtgttgccgtttcaggcagaggcggaagaccagcagcctgtctctccaacctcttcctttcagctctttctcgcttgcgcgcgagcttttcaattatggcccgcttttcttctcttttccgggattcgggcgatccaccggcgtacaatccgggcgaccatgcccggggacgcaggtccggactggtgggagtggcggtatttgcggcgctctctttgcctttccccttgctgtcaccatctaccttgcccgggttcttattctgtccttcccgttctcgctcgcgctcctggtcccgcttgagtctcttcctacgtcgacgctctttgtcctcggcagtgatttccggcgagtcctctctgggcctcttcttcttcttcgaggggtcctcggaacgagttgcggtcgcagccgaagtcgatcccgccaccctcgcgaaacttgttgccacctttccatgctgattcttcttctgctttgaagacgacggttcctcctcactactactcccactcgtcccactctcctcctctgcgctcgactcgtcgtccttgcgtatcggcaacaaaggataccctgctgaatcacgcagagattccgcaatcttcatgttcgtccaccggatccacttgatggcgttctttttacgtgcgagccacttcgcagaggaaggtttgacggcgagtttacgcttggcttccctccaatcgtccttgtagacgcctaaagcttctctataccatttatctgataccacaagcgagacccgccccgagttgaaacagatgaagatgagcttcacggacagtcggcccgattccatgaaagggcgagtacagatcactcgaaaggaggactcacggaatagattagcaggcgtatacacgacatcccctacctttgccggcggctcgctaggatgtttcccctttctctgcgtactggcccgcgcgatgagcttgttctccttttcgaacgagctcctcgcgtgttgccagaactctttgacaaacgtcgtgttctcgtcaaacatgtcgtgcgtgatgggttcttcatgggcggtctgtgctaaagggtagttgtgccagaggttatggtaatgccatccgcatccggggatacctttctcagggctgaatggtttgtagatggcgtacacgatggcgtctgcgaggaaggagacggtaatcaaaggagggttgaggattatcagcgtcgagcaaaggatgatgagacagggatgtaaaaactcgcctacgacgaagacctcggcgttcaaatccccatcatcaggatcctcgataggtccatcggattcaaacgacagttctctagccaccttcttcttctttttctgcttcttcttgattgctacctccggttcggcaggattcgagggacccgcgatggcattggtattgaacatccccggaggtcgggcggcttgtgttgatgatgatcgcggccgactcgaggaggtgattgcaccgccagtcgactgcaactgatcattccccatcacgagccacctcttgcctatcttgggcgtctctactagatcacgtgaacaagatggaaatgggagccggctttatgacatgatcggatagatatatctcgactacagctacctgacctaccttcttgctcttctgatcccaaaggttactcactctgttgtccctccttgaacgatcagatcccgtgatgaaaacgcatagatatcattccactagtcagtccatggattacgtaatcaatctccgttatgcgttttcaaagggaccatcgcccaccgcgctttgcccgaaaacaacgttcgatccaggtcaaagccaaaaccatgaccccgattgataaatagatacccgcccaccagacctcccctcttgcccgacacccatatcgacagaccttccgagtagtaaaacagccagagaactaacttcggaagagttctttacctgataattgaacgagaggctcatcacgcgcggtccacgttcacctcctcgccacgtaactccgtgtgacccgattgacgaaccgatcgatcgcggcgagcaggtcaacctagctcgacaaaaaagaacaaacgccagagcgttcgacattgacttcttgtctacactcatcacttccacttgaacattgacaccctacgacctttcttcccaagatgaagatttctcaaaagtttgaactcgccgccaaggaagatcgggtcctatggtcgttcgaatatttcccgccccggaccgctcaggggttgcagaacctgtatgataggatagagaggatgagagagttgggtccagagtttatcgatattacttggtgagtctagacaaggtggcggtgacggcggcgtcgtcactgtcgtcgccgccgttgtcgttgcgagagagcctacccagctaaatatttctcctcctttctttcgtaccatcgatcgatcgaccgcccgattcttaggggagccggagggaagaactcggacctcaccctcaacctcgtccaagtctgtcaacagactatcgggatggagacttgcatgcacttgtgttgtaccgagagtgcgtagcccccgttcctcctactgcgagccgttggtggtgacagcggaccacacggggctgattcgttgtgacctggtttgatgcgagtagtgcccgaggccaaggtcaaggagtcgttacgtgtgagttgttaagtatgatacggaacagagccatgtgtcaatagccggatgagctgactctcccacgacagatcgccaaggaacacggatgtcagaacattctcgccctccgtggtgaccctcctcacggtcaatccgaatggaagcccaccccgggcgggttctccaaagctatcgacctcgtcaagtatatccgcgccgagtatggcgactactttgacgtcgccgtcgccgggtttcctcagggtcacccagagactcccgaaggcgaggacgacaagcgtaaagagatcgaatacctcaaggccaaggtggacgctggggccaatttcatctttacgcaaatgttctacgacgtcggcgtctttatcgactgggtcaaacgggtccgggccgcagggatcaccgtgcccatcgtacccgggatcatgcccatccagtcgtggcagaaattcatgacatgggtcaagagggagaacatcattgtgccccagcatttctgggacgtcctcaaccccgtacaggacaatgacgaggcggtccgagccgtcggtatcaagttggtcgcccagatgtgtagggatatcctcaactgcggattgggcatcagggggttgcacctctacacgttgaacttggaaaagggagcgaggatgcttttggaagagctcaagatggaggctagcagggaacaggttcatcctctcccctggcgaccggtgagtctgcaggaggaaccgcagaggatttggtcggatgtcgggggaacatccgaggctgatcgtcccgctttcatttcatgattctcgattccctctagtcgctcaccccgaaccgacggggcgaggccatcaggccaatcttctgggccaacaggcagcagtcttacctctctcgaagtgagtgccaagtcaggaagacgctgttgacagcctcatcgaatcagtttgggttgactttcgattcccccgcctctgccttgctcgccccatttagccgaggactgggacgagttccccaacggacgatggggtgattcgaggagtcccgcgtatggtgacctggatggatacccggtcaagattgatgttcccgtgagtagctctttctgatttggtaaggggaacgcaatggttactgacctaagtgactcattggcagggtaatgacgctctggagctgtggggcgagcctaaagagtaggtgcatgatttgacttttcgcgttgccccggcgctgaccacgctcatatccctgcattgccagcttctcggatatcacagctctctttgccaagttctgtcggaacgagctcaaggcgctcccttggtccagccagccggcgtccaaggagacctcggtcatcgaccagcagttggccaagatgaacgagcttgggtatttgaccatcaacagtcagcctgccgtcgacggtgctcgtagcgaggacgccacgcacggatggggtcccgccgggggatacgtttatcaaaaagtgagtttcgggcacagaggtacgggcctgccccagcctggtgtggactgacggagcgctcgtcgcaggcatacctcgagttctttgtcgcgcccaacttgctggacgagctcgtccgaaggatagaaaaggaccctcggatcacctactatgccgtcaaccgacagggtgatctgcggaccaacactcatagcgaggggcccaacgccgtcacttggggtgtattcccgggcaaggagatcattcaggtaagccgaagcgcaggctccgaagtgtcaagatacgatggttgctgaaacgcacggcttcttggtctcaaacagcccaccattgtcgaggccgtttcgttcatcgcttggaagtgagtacccggctattcggatgcagatcgtcggcaaatagtgtattgacgcgctcgtctcgacagggacgaagcctttgagctcggtatgcaatggtcaagcctgtatgatgaacagtctccctcgcgtcaactcatcaaggacgtcatgaacaattcgtacctcgtcaacatcgtcgccaacgacttcaaggacggcctttccatctttgaaccgtttcagctcgatcgcgtgatgcccgctgctgttaccaaggctgtgaacggcgtcggtagtgctgttacctcggccaccgagactgttgcgagcgctgccggagctgtcgtcaatggtgttagctcgctcgtcaatggcgcgggatccgctgccgagaacaccaatggacacgtcgagccaaagaccaacgggacgcatgtcaacggagacgcgaatggtgtagaccaggttgctccaattcccaacggaaacaccgaacctaccactgtcgctcagccggaggccaaagacagcgcggtcaaccgtagttctggtaccggtcccgcacctaaggctagcaagaacctcgacgagctttttgattcggtccctctcttcatgagggagagtccgaccgctgacggagaggagaatgagaccctggaagccctgaagtctttaatctttgacggcactcctgatggtgagtgtcatgcagtcccaattgacacacgtcatgcccttactgattggtactatctttcccgcagagattgctgaaaacttcaagaaccaggctactgaacgtcatcaactcggtcagttgcgtgacgcgctcgggttttacactcagggactcgaggccaagcccgacgaccgtcagcttcgattgagcctgttgctcaatcgtgctgcatgcaacctctcgcttggcaactacggatccgtcctgagggacactggcgccgctttgaccgagagccccaactcgcccaaagcctacttccgcgccgcatccgccctgctcgccttgaaacgctggaatgatgctcttgactgcatcagtcgaggcaaggctctcgttactgaggctgccgaagacaaacaaaagacctgggagggactcgaagccaaagctaggaaaggactcgtcggaatcgaggaacggaccgagagggagcgccgagaccgagttggaaaggaagcgttgaggcgggctttgcaggtgagtacacgcagtgattaccctacccggcgaccacggctcacgctataccacgcgttaggcccgaggcattgttcaaatccactcgtcagcccctcccgacaacccgactccggccgcctttgacgacagcaacgcaggaccgactatcccgctcgttcaggccgcggagaatccggtcaaatggtatcctccccccacggatcatgctatcgtttacccggcgtttctcatgtaccccgaacacgctacctcggacttgatcgcccgattccacgaagacacgacgttctatgatcagctcgaggtcatgttccctgcggacgcaggcgctcagcaaggcggacagtgggctgaatgggacagggcgcacgagtaccactgtgacaatctggtggtatacgccgagacccacctgaagaagttgctcaagattggccggaacctgacgcttcgggacgtcatcgctaaagcagccgcgctcccacctgtcggagagcaaaaggacggtctcgtcatgtcagacggtctcctcagctttgtggtgctcccgaagggcaacgccgagcagaactgggtagagaagtacaagcagtcccgcgggtctgcctgagcggattctctatcgaaacaaaaacacatagatggtgcttcaacaaggcatatcacgaactctcatcctttccttttcacgactagacgcccgtgacatttacgctcaccggctcaacggcatacatcacgacctcaacggtaaaacaacttgtagacgatcgattccacaaaagacaaatgtgtatccaggcatgtgacaggtataattatgcgagatacaagaggaatgaatgcacagattgtgtcttttgggaaagggatcgtagcataatgtctacctagagtcgtgaggatgcgcgcctttcctgcttgtctgtcgagcacctagcctgcaagtatgtgctttcagtgagggtgttggtgcatcatgtggcgaggtgatgcgggtcgcgagtgcgcaggagtcatcccgatattgggcgatctaaagttgtcgcaaaggttcagaagaaacgggtcaacctgggatcatgtcgggtctcgtcgaccgaaggctcacatgataccgcttccaaactgtgtgtgaacaaagcctccgctaagctcgagttggccaaatcctccaaacccctgtgattccggacgtcgcatggggtcagcggagaccaaataggtgcaggatgcggaagcgactcaatgacgtacgggcatcagcagactgttctcccagttgatgtcctctagcccgtaggacacggcacctagaccgtccatgaacacgccactcgcatcttgcatgccattgtgaacggtcggatcgtgatgtatctcagcagtcggcgttggagcagatgaaacggccgcatgcggccagatggttccattcatggctccctgccccgagccaggcatgtcatttggttgattgtttgtattgtccgcgttgtcaggcacaatgacaggtgtactaagaccagtatgcctgtcatgtcagaataaagcgattgccaaagacaatacaatacgactcgacgtacccattgagccctggcatggtctgcgccggctgcggtaatgactgggtcccgaggccaacgtacggattccacagcaaaccctcgtcgtcgttgcctcgcatcgtgagagccccattgcagacggtcgccaacgttgtagcgctacgggaatgtcgtgtgccacggcgttccttttctgcggcgttccagtctgtccgcaactcttcctgcttgttgccgacgaggttgcgcagcagcgtcgcgtacaatcctacagaatgaacctcgtccacagcagcagcgctcagcgtgtcgatcgcctcgttgagcgagttgagaatcgtctgagggtctccattcaactgcttgaattcgggtcggatgagctagaagaaaggcagcgtgcgtgagcaagactttgcgtcgactcgatgccaaagattacactcaccttgagcaaggagagacactgcgatgaaggcgcaaaacgcgtcagctgcgggatcgacattagtgctgaggccgttgcgacgtacagcataacagaacatgaccatttgcccatcggtaaaggaaggaagcaaaccacgcggggcgatcttgattttgacgaccgtaagaacgcccatcgcggcggtataaactttgctaaaccagatgggtaagtccaggggagatgtctagccgaataccttgctgtttagcgatcaaatctcgcctcgaatgtgacaaaacctcagactcacctcgattgcgtattgcaacgcaaaggatgacagaacaagggaattgtattggtggtagtagtccgccattgcccgatataggatctgcatatgtacggtgatttcgttgttggcaggctcactggtatcgatcgtataatcaggtcaaccaaggtcatcttcggacgccctgacactcggagctgcttacactaatggaaattgccattcacgaagccatccgtcgagctgatcaaggacggcattgacgactaaaggatagtctaccccgggcacaagtcctgacgaattagtggtttgctgagagtagagcgaatccagagccctcgacatgatgcgttgcatgtcggcatatgcggcgagcacgacgtcttccggttggctggaagctcgcgtgaaccaggaggggtagcgagactggcggatgatggcatcctctcggatcgagtacggtcgtcccatctgagcgctttgcgaccggtcgtggataaagcagagtagccaggtcctttcccgattggcgatctctgtacggtgcaagacgtaaacccgttagaaggacgctgtgaaggcttgaatggagcgggcgactaaccgatatctctcaatctcccttcttcagtatcgagaggcatgacgacgttcctcttgtacaggttcatgtcggttccaatcctgtgcaagccatctagtcttagcggctggaatcacgggcaacacctgggctcgcattcgctactgacctgatcgccatgcccaacagaaggtaagacagatcctgctcccaccgctcttctggcccaagcgtccagttgaccagcaacaagtacgcctgaacgatctcgagcgatttgtaaccacgcgccggtgactcgaacatgagctttttcgccactgctgcgagctttggtcggaggcctgagtgttttggatggaaacgggacgctatcgcgcatatcctgagggaatggtgatacagaaattaggaaagcctttctaccgtggtatgcatgaaatgcagctctgctcacgttgtcaggaggaagggagatcgcgcgcatacgcctgcaggagtgtgcaactccttgttgagaacggggacgttcgggtgaagtttgtcgaaaaagatgtcgaacagctcattaatttgtgcggccgaggtaaaggaaaagatttccggtttgagctgtgagtgaccgcgtcggttagcatccgggaatgacaagttgctcaacagcctggtactgacttctcgctcgatgatgactctgcgatcgcaagcaggcctcgtgatcagtcgtaatgcatcgagacgagtatgccctgccatggtgctcacctccgaagccctagcgagctcatcggcccgggcctaaagtaggaagcgtccccgacgcccaaccgcttcggatttcccgaatcgtccacgctcgactctctggttctagctttgctccctccaacccggctcttcagcgcatccgcaccattcaatccgctctcgatcgtctggcctggtccatccattgcaagattgttcaagttgacgttggtggccgaacgttttcgattttgcaagctcgcctcggccaacagtccgagcgggttgagcgtgttatccggcagggaatgcagtcggggggaaggaggtccgttcttgcttccgccggtcgtcgaaccagcgacagcgttgccactagcacccgacgtaacgttcgatgtcgacgtgttcatcctggagagcccagctcccggtcgacccatcagtggcgaccctgccgaattatctccaccgcctccacccaagggtgagatgcctggccgagcgggatggctgaccgacatgtccgtataaggtttctgcgcatcgagctgttccgcacccatgagatctacagtccaggccgggtagaggaattcagctttggcctgtcggggagcgagacgtggcgacgctctcgacctacctcttccaggagacgtcatatccagcgctcgattgccacccggcgcgggcgatccgtccatcatcccgctcgaagccgagggcgacaagttggtcattcccgaagccaagctcagtttcggattatgcagcgacctcaggacctgttcgattcgttcacgccatgttacagctcccttctcggctttcgatcttcgaagcgcgatggccctcattgggactcacggtatccaaggtattctccatatccttgagattcttggccatgatctcgctcttcttgcccttgctgctccgtttaccccgcatcgactcttcgaacacgcactcgaggttcccgttgcggcagcgtagacatcgaactccgttgtcgatatccgcttccacgcatttcatcttgagtctagagaggtgcgcggatagcatagcatgaccgggtcgggtcagtctttgggctcgggaaatgattgggagcgatcgggagggacgatcgactcaccttcgacaaaccgtacacgctctacagaacgaatcgtccaagccaagcgagaacgaggatcagccctgaccccgcgtctgaccccgcgacgttccgttgacccaacgcctcggatcctccgagactcacctggacccccgggtcaacttcatcttcttcttgcccttgccgcctccttccccctcgttcctcccgtgtccacctccaccggtaacagacccagacctgccgccacctgcgtaatcatccgattcgtcaccggaatcaccctcgtcgtcgtcctcgtcgtccaccatcccgttgttctggttgtggaggatggaagaagggtgcgagggggaagggaggtctgaggcacctcgaagaccggcgagaaagttggaaggcgcggcgttgttgttggtggtcgtattgttgttgttgctggtgttaccgtacggagcgggaggtgggaggtggtaagagttttgagggttcgagccggacaacctccgtttcttgctcggtggttcgcggttcgaactcgacgtggaattcagggcacccatcatacccgacccgacgttgccgttcccgtgcgtgttgctgtcgttgctgatactgacgttgacgctagggatcccgttgaacgtctggttctgatgcaagggggaggaggaagccgaggaagatccattcccaccaccaccacgcacccttgccctcccctctacccaagaaaaagcccaagtcgacggccatctcattcagcaagcaaccgcttaccgaaacaactcacttttcaatccctcacccggacctctttcaacccaaacccccgtcaaaaaaaccctcacccaactctattcaaaatgcttatcaccaaggagaaccgaagggccatctacgagtccctcttcaagggtgagtcgtaacgtcgacgagtgtgcacatctagtctttcccggctgaccgcttccgtctccgacctcgacgtatttcgtccacaccgcagagggagtcatggttgccgagaagaacttcaacgctccttcccacgccgatctcccccaggtccgaaacttggaggtcatcaaggccatgcagtccttgacctccaagggttacgtcaagacccagttctcgtggcaatggtactactacaccctcacccccgagggtttggactacctccgagaggtacgtgacgacgagagtttgcgacgacgacgacgacgaaactgacattgcatctcctctcctatcttttgtcacgccgcacagttcctccacttgcccagcgagatcgttccccagacccacaagaagcccgtccgagctcagcctcctgccaggcagggtgccggtggccgtgacggtgcctacagggctccccgaggcggtgaccgtgagggatacaggaggagggaggacggtgacgccaaggagggcagcggcgagttcaagcccgtgagtctcgtcgcaccagcgacgtgtcgagattgtcaatcgaggcttttcttctgtttactgacgacctcgaccatgtcgtctgcacgcgctcttgtagaggttcgctggcggaatcggtcgtggtgcccccttgtcctaaacgtcgacacgccttggacctcgtcagacggtcaatcaggctggcgtttgacggcaagccgttccaacgtcatccccggtcgacttgctcggacccggtcactgcgtctcttctcgtttaggatctcggtcacgggaatttcaaaaaatagcaaaaacaacaacccccaatggaatagcgtcgggcgagaataggacagggatgcgggagaggattacgggaacacagggaggaatgtgaggatctcggccacgtgcggttcgcattgacctcgtagggacgggatcggggagacccgacactcgtccctttgagtgagatgggggaacacgtccgacctcgtcgtttgtcccttttttccggttcacagagcgcacggaggcatggtcaaccatgccctcgtcgctccatccaaccaagtctcggatctttacttcgtttcgatctctcttttctctttttttttggtcgagtaggatgtcgtttgtttgtaacgctctttactgggaattgcgatcgatccatcatttctcgctgcccttgtcgtgttgattgtctccgtgaattccgtggaaccctttgtcgtttaccacgttcggtgacgattgaacggcctttgatgagattgcccttttgatccgttgagcttgctcgtcgcggcgctcaagtgattctaattacctaccactctactgttctctttgtcgccgttcagttcccctttgtttcatcatcgattcctctcatcaatctaacatggtatctctcttagaacgctcggggtaccagggcaggcggagttacctatatagcatcatcgatattgagttctcatcaacgtacaatcccgatcgatcatcgatttcatgagatcacgacgcttcgactacacactgcaacaaacacgcactcggattaccaattagaaacaattgacaaacactgacatgccacctcgtcgacctcctccgcttcccaagagcctcttcaccgacggacctttagccccaggtgagcatacaacgactgctttatgatggcagagtatagtcaccgtgctcatctcaactcttcaggcacagcacccatcgctccttccccctcgagcttgcatcctcgcaagattgtcgacgcttcttatgttcccggccgatcgcaagcaaactatggaagcatcaaggtcgaagccgtcgttcacgctgcgcaacatcacgacgtcgaaaaaggtcaagatcagcttcgcgctctgacccgtttgccgaccgtctcgctcgacgtgagagcttctcatgacgagctcgacatcgtagacgctgggcattcgggaccagtacagatcaacatcgatcagctcgccccgctcgtcagcgagtcggactgggacgtcctggaggaactcatccaccgtctgagtcgacctggaagagaggagaaaaagggacccagcgagactggactcgagggtttgattgccaagatcggggaggaggtcgtcaacctgggcactcattcagaggcggttgagaagaagcgaatcatccttatcggtatgtcgaaaggctactccacccggctcgtcatctggttgatcatcacgtcatccttatccaaacaacactctactaacgccgtatcggtcttgctcgtagctggtctccttcctccagctttggctgcccacctcccctcgcaacaactccagtcctcacagctgtaccaatcctacgtcaaccacgtatcgtcgctcagtctgcacgaaaacgtccatctcctcctggcaccaccagtgctttccaacacccagccagagaacgccaaacccgccgggacatggtggaccgacggcggggagctggaccgagtcgtccggatgtacggtgagttgagctgatcaatcgcactccgaggcggcgaggaagcgccatcgatcgagaactgaaacgtcgtcatatgcacacattaatgcagtctcgaccgctctcgaatgcttcggaacgcatcgtcttgtctttggctcagtcaacccagccacactcgacgaaacccgtcaaagcttcgaggttgttcagcctggcgattggtacactgcgaccgcccgtcaggtcatcgctgaattggtggccggggagggtacacaagccgcgacggctgccatggatgccgtatttgccgacaacgcattcagcgtcttttcgacagtctaacgaatcgatttcaaagtttcgatcggtattctgcagatgcatcgccaaggtgtgccactcggcaacccttactcacagcaaagacatcgctcggtctgctgtcgttcgatcttcctcaaagtatacgacagacatcgatctcgttttgaaagccaagttcgattgccctcgcgtgacggaccgctttgacacgctaaatctcagcttcatgacgttttattgcactcatacattagatcatgcctgtcgaccttttagcttgcaccattcatattcgcaaagacctattttacagcgttcagtcgctctcggtggtgtcgaaggtggaggcacgatgtggaggccggtagaagccgggggcgacgtttttcctgaacttgcaagtcttgattttggctttcgactgaatgcgatattagatattatcatctagacggtctcctagtttacttgcccttccggcccttactcgatctctgattctagcttctcgtatcgttactcacttgaatcatggacgaatctcaagccatgcagactgaagactcgaacgacgttcgaacggtagcccaatcagcgaatgggaggactggcggcaagggatggaagttgcaaaagacagccaccaagtcagttccaacgctcggcgaaacccatgtgctagcctagctgacagtcatagtacagacgatcccatctgatgccgggagtcaaagccaagtcgtgggacgaacgaatgctgaagcgcaccaagctcgaggcgctgaaaaaggtcgagcgggacatgaaggatgagacgaaacgggaacaagaggcgacacgtctaagactcaaggagcgtagggaaaggcacgcggagcgaaagcgggaagaggagatgcgagctcgcatgagtgcaaagaagttgcagaggatgaagaagaggctgggaaggaccaagaaggtcaatggttgagggacggagcttcttccacccgcgacttgcatcttgtgagtaaatttaagatctatcaccattgtgtagcggtcactcatcgccactattgtaacgcttctttgacgaaaaggttctggacgttagcgtgtactttcggtgtaccagcctgcctgttgtacataacgcagagaagacagggtatacatctatgtccgatctcccacatctcgctgaagccgacaggaactttacaaaagatatctcggcattgtcttcgatcgctacaacaccgatattagatatcccacgatccatcatcgtcggcgtcggtgatgaacgggcgctccagcgttgtcacagagctctgggtcgtgccaaaactaagtcagcgattgcctgtgtgtgtatgtgtcagaattcacattgctgcgcgacttacctcgcacagaacgcatgtcgcggccaaaacttgatcgatctccgccctaagtgtttcgatcctaccttggtcacgagcatcattcgcgaccatacttcgatcgcccttggcgccttttccgctgacggcgctgacggcggatgccagcacgtcgggaatgatgagctcccgcaacttgtcgccggcggcaagaagcttcctgctgccgcccaagagcagactgctgggatcgagtgccgacgcgatcccttcaaccgcagaagtcggtgcagatccagcggagagaagggtcctcgtcttgttttcctgatcagacgatacgtacttgataggcttcgcaagtcgaaccagctcgtcttgtaggtgcaaaattcgacgcagagagcttgccggtaaggtttccttcgcctgcaacgaaacaaaacgggaaacggcagattgtcagccgcccaaccgcttccatgcaattcgggccgaatacagaccatagcgatcagacagtccgcgtggaatgtatgttgacatgggaacgcgtaaaactgtctagtgacgaggatggctcggcaacgggaacagcgttcgtttgcgtctatcgtgatgaaacgattccgcaaagcctcgatgtctgccttgatgttctcggccgattgggtcgcgtcatccatttcgcctctcaacttttcgatgtgaaccgaataatcttccagagcatcacaaatctcgtccttgaaatcgttgatgacagtaaaatcggggaagaacggcagtatgtcttcgatcttcaggagatccgtctgttcaaggaattgtatagcgctagttggcagtcacacaacgatcatcagctgtgtctcgactatgcggtccatctttcagcgggactgacctcttgatatccttgcgattctgtatgacgtgtttagcgatttttaaccaaagtcgtcgccgcagatcgtcgtcgtcttctggcttgttggcgttgagtcttgcaaggtctaaattgtcctttgcgagagccaaatccacactgctttcgtagaggcccattttggagtagatcagaatgcaagagagcaggcgatcgttgtgtttgcaggtacgcaacgcgtaatcgaggtcgtaatacggtttgcccgtgagtggatcgtcgtgaacgctgttgaggaatcccagcagcggagcttcgtccttctcatcctcttgagccaacattgtaagcagcagattatgcactgttcgttcccgatcgccacggtcaattgatatgcgaagatatcttatgacgtgagttcgagcggagaggttcctactgcgatctagggatagtaacgctggtaccagacgcttggtttccagggagggttgtttcagccaacaatccaccgtctctttcgtggcatgggcgatcagcgtcgaggcgtgtcgatagtagagactcaaggaaggctatgacagtaactacagtcagccgtgcgattggaatgaatgggaaaaaggactttacggacttgtcggttcaagacatcgatggacgcaagccaagattcgttgtcaatatgatgctggatgacaatatcgtgatcttctagcaggccggcgtagaacagatagatgtcagtccggccatggctctggatcagttcgtaaacgacctttgcatccagattggtctgccaaccatcatcacaaagatcgatttagaaacaatcaaagatcgcacagaaacactgcgaacatgacgcactttgtaggtcgtcaagaatgtcctcagatcctcttccatcaacatgagctctgtccgaaggctatccacgtcagacgtagcagcttccgctgcaatgatgtcctcgagcgtgttgcatttgctcaaatagatctcgacaagccaagtcgccaacatcatgcgctgagtgacgtcctggcgacgtgcatgcagtgtaagcattcggctcgtttgcttctccaccgcgcggtgatgggacttgccgttttgggtagagcgttcagtcgttccgacaggtatatccgtaacgcatctttctcgtccgcgtccacgaaacgtaaagcaacaaactcgaaactccgtgagcattgagagtaggtctgcgcggcttggagatatcgcttttggtcgaagaaattgtcggcttgtcgagatcggaccatgtccaactgctttgggctctatgaaagccacacctcggtcaggactgcctcgcccgcttactgtgcgtatgcatagcgcaccttcgcgtatttcagggcatcttcgaactctcctgcttccagcctggctttccatacgtcccgatcttcatccttgaccacgatttcatagagggcttgattagtgtagacccagaaagtatcgttctggtcatccgaaacgagtcctctcggtatctcgccttgtcgctgcgggagatgcattttgatccattagagttccgtcacatcatacgcgcacaatgcctcactagattcagattctcctcccatacgatacgtgcagtgagacgagagatagcagtgaggtgtgaacggaacaagaggatgaagtgaaattccgtagccaggatcgatagcggagtagtcgttacggccgcgtcggcttcgacttcgccggaaactgtccacgagcaattttcgaagcgttccgtcagtgccgatgactgttccgatggcacctcggcatgacatatccccgtttctaagtcgctgagtgtaagtgcaagatcgcgagagcattggggataagttgcgcatgtcctcactcgacagtctcgctagtatcctaggttggcggacagatctcaggctattctttctcatgttcggcgaagccgtctgccagaaagaactgagcatggaaggtgttgcaggcgctgtggccagctcgatcgactctatagaggctgggtcaattgcgcccctccttgcatggggaaagtccaaggatctttgcttacttggagatggcttatgctctcgcaaggtgcgagacatctcgtctgaccacccttgtttcccaaccatgttccaaccgacattaccgcttggtatggtagcttgtgcctcgtagatccgcgtcaacgtggataccaagagccacaccctcttctcgcctgcagtcttggtactcccttgtctgatcgaggcatctttccagtaaccgaaagacaggcctcctacgccatctttatccggaaaggtgaagatgtcgacatggtcccgctcgaaggtcttagcgagggagaccgacttcaggttgaagatatcgtcgctaggcggcaataccaacgtggagattgttccatccggggagcccagaagacactctgcgacatcagtcctggtcgttccagtcgctgacggcgcgttgggggcccacgctacgcaagtgaccgcatgcctcagccggagcgggcgggcttttcgggccgtattcgacgacacggcctgtattgccgcgaggtttgtggttgaaacgtagaagacgtcgccagtcgtcactgtgatcaaaaggtgtctgcccgacgggtcgccgaaaagctcctttatcgctggattgctcccccttccgtccggcgcaggacgtggcaaatccacgttgacaagttcagccggtcggttcaagtcgatcaaaattagagatagtggatcgatagccatcgcaagggtgttgctgttgacttgtaacgatagtaaggcgcctggtagtgagaattgaacaagcgatagcgagaagataggcgcagttccatctgccagcaacttcggcgcatagaggggttctacctggaagacagtgtgaacagcaacggcaggtattaacaccgggaaactcccatttgaagacatgcgccggtgaacttaccgtctctagttcttctccgccagcaaatccatactcgtgttcgccgtccaaaggcgattctggttcaaagccatcgaccgtgatgaaggcagcttgttgtcgccgaccgtgagcgtcgtgcaggtggactccgcgggcattgaatccggtcgaggagtgttccacaactgtacgatatcagtgcataagcacggccgtctgacgatatacataggccgtgtcgtggttggagtaagactaggcattgggtcacttacagtcgtcaaacatcttctcagctgaggggagctagggagctgtcaaccaagaagtcctccaaattcggatcaaaccaatcgagtattttgcactggtgtcaagtcaggacgatagcgagggatgtaggagctgcatttcgagcgcaggtggcaggccaatgtctgaatggttacgctaacatgatcgaatcaaaatcgatatcacactcgtgcacttgtccgtagtcgccgtactactgcagctggcgagtatgctcggcttcgtcatatcgatcgaccacttcagcgatattgacctgagactcgacgtgagatgacaagaataataataatgcgcaagtcctcgaagagggatgtacaacatcaacagcatgtagcgggtagtacaaaggctagctactttgtaacaagcggatcgttccagaatcgcagattaggtttcaagtatacacatctcgtatcagaccgtggccagacccgctggtaccacgtcgtcggttccgaccggctgacgtttcacgtttgagggtgcttccgaatcctacagcggtgagggatgcggtgtcattcgtaggccggtccaacgccaggcgatctgccatccggtcgatcaatatgccagcggaagaagccgagtttttatcgaccacattcgcgaccggggcagtcgtggcccgtttctgagcctgctttgatctcagaagcttgacatacagcaaatatgctagtgccaatacggcttctacgcacagaagcatcatagcaacgttttgggtaccaccggcttcaattttgtccccgtcacggctgaaatgcccatggtttgacgagtcgttcgcgatcagcgattcgtgaattgcagattgggctgcggtggacacggccttggcattgaccagaacgtcgtcaagaaggcttccttgatcactctggtagatacaattgaaggctcaggctcagtgcctcatatatgttgtgcaggacctcaagactcactttccaagaccacaatttgctattgtgaaatgacaactcgctctgcatggtctcaaacatactgcgcaactgcttgcgttcgacctccaagttggcgagcctggtactcagatccgcgagagcggcgctggacataaggattcgtcagatattttgcgagctgtagagattgctcggacatacctgaaaggcgactggccactggctggaccactacttctagcttcacggccacgacgaaggccttttcgtcccgcgccggtcttgtccaccaatgtccttggagcatccccaattttggaactaagagcgtgcattgcggtcatgagctccagctgataagacacgatgtggtccgctacgtctgggtcctgccgcatcatcgggtgtgaggcttgtgtcttcccgataacgctcgatctcgtccgggctcaccacttggccgccaatgttggcgatatcggcagacgtccgtcgtgaagtcattactttagtcgcttcgggagcgtctctcatcctccaaggccgatatgcatgtccggctgagggcttagggtcgatacagatggctatgtcaaacaaatgggagacaaccgcaatagcttagtcaggttgaaaccatagttgcgaggatatatgctaaccatgctgaacctctccattcacgaaatcgctctggaatgtcccttctgaactgcctcgattgaaaatgaagggccccgggtcggcgttctcgggcgcatgtggacaagtccgtcctttgaagcccgaatacttggcagtgcttttgttccttagaaccttgaacgctttcgcactcgccactgtgataccgtagccgatctgatctccttcgatggtgttgtcgctcaccgccccgccgtgaacaattgattcggtatcatccgtccagcaagccatgccgacgtttattcctcccttgatgtaggagccaaaggccgatatggtattgtgatgcacacgagtacgcgagtagtcaccatcccaaggatcgatatcgaccaagttgatgccttaacgtccaggctctatcagtatttgcgaattatcagtcgaaggcgaccgatcgataacgtacctcccataatcatgcgggtcctagatataactctgttattcttgatttcacttccaggactgccaaatattactatagcaccgtcagttgcgtcgtagacgatctattgtagtccacggaagtaagcaacgacatcgaccataagcatatgtttagcgttgtgggcagggcagagcatgtgaagaaaggcctcgtaagcatagcggtctaagacggatggaaagactacggtatgcggattttcgatcacttacgttgccatcgacgaggctatctacacaagcgagacttattccgtccgcccggggattgccccatcgagccccctccttctctgggccatcatagtcatcgtcccactcttcccctgcagggccctaatcggtatgcggtatgatttcagttggccgcacttacagaacgacattgtactcacgatttcgttattacgaatcacaccacccctacattgcttctcatcgccttcgcggtagtgaagtgcgctccatcccctgcatgacggaaagaatcgagcgtcagctctttcgcttgatgatgaccccagtctgctttggctctcagatgtcccgatccgaagccgaaaagtctgcaagcagtttcatgccgggctcggaaggaaggaatggatttcacttggagatcacttacctcggttccaggatccgacaatccttgatggtctgactgtgagcgttgcccaattccacaagggcgccaccctgttttatgcgcaatagttccggtcgattaccatcgataataagggacttaatattgactttgttgcaatgacggcaatccgctcttcggtgcgtgaatatgcttgagcgaagattctctctgctcggataggtaaataactcacttgatggcggttgcctggtcagcgcctttgacaagcagcgttgctcttgtccagtccttggggtctcctagtgtcgtgagcgtttggtcatgactggtgaagacgataggtgcatccagatgatgcactgatagaggacagaggtacacggtggtcttggaaccccctgaggcgatgcaccggtcgatttcagccataccgctatagcagatcagctgttctcgcacgtaccgttgcgaaatagatcatttatcacgtcctggctgccagcagaagacggtaaacaggcggtttgtgcagcgttgcataggcgcactccaaaggcaaacagagccaaagcggatcccacgttgcggcagaaatgtaacatctctgcgtgctatcactctatagactgagagggggctccttgacactacgaggctcggaggagcgaagagaagagcgaagatgtgcaacgtataaggggaaatgtcgtgttgcgactcggcgatgttttgtttttacgcggagctgaccgtccttgtgcagttctaaagtatagatacttttgtttaagcttgcatctatcgaaggacgtaatggttcaatggtagaatgactgccttccattcacacgggatactagcagccgatcggtgttcgattcaccgttacgtcaattctttttgcggctgcggtaaacttttgcatcacgctaataatcccctcgctaattgtcgacgggtgaaaggtataattgggtgtgatgacaaatgaaaaatctaaaccacactagtaacactgtatactatacaatagcgatcttccatactcttcagagtcatataaaatagcgctctgaaagggtattcaacacatgtagttgaaaacgttctccgacgacatgtgagatagctatggcccccagcaaagtggaccatggatgccaaacatgccaattacttgttcaagaaaccctttactgagcacaagttaattgatgtctttcaaagttgcatatgtagcattcaaatactacacctcaatgacttgacgtttctctccatgtgctctcattgaggcaggcatgtttgttgtgcggctatttgctcaagtatctaatagccagagacacagccaatcaccattgatttttcttgctgctgcatttgaatgtatcagtcaccagcttcctctgcatttctgtcatggcagactgattattgagttacgtcatggggagggtgcagatctaggtctattgtgggtggttgcagaaggtcttttcccaaagctgagtgttactgttcagacccctgggccgtttctgcagacatgtgccccaatacttcgcggcggaccgcaccgcagagtactctcgggtgggtcacgtgacggactccaaggacgagacatagagcgctagagaggcgtatcccatagtgtagaccgttgtgatagcactagtgctacatttgtcatacaatcttaggtaggagacctaaggtgcaagtcccgcgcggagtaacaaggaattagccgaggcctaaccctaacagcttggagcaccctgtcaaaggagatcaagaagacatgtctggtatactagcctctaccttgtagtactattgtagctctggatctgccgtcaactcatctagctatatcctaccctcatacctggcctcagacaacatctccaaaggctatctctgaaatggttccaacctggacctcctcagcgcctaacagtagtaaagctagtgctgcatctgctatacaatcttaggtagcaaacccaaagtgcttgtcccgcttgaagtgtagaggagacagcccaggtctaatgttagaaataggcctttattggcctgaagggtaacatctaaccctaacaaggcgtctgtctgcaacaataagcctttagtcttgccaaagtacgccaatattgacactctattacaaaccattctgactctgtgaaagaggactccttcttatctgtgccttggagttgctgctcctttctggtaaggttgtaacaaaggtgccaatgatgaccgtaaatgtagtcattgaggaccagaagtcaatagtgatctgcagtagagccgaataaattcagtggtaggacttggttgactaattgtttatgtctaaccctgaagtatctcacaaggatacagctgctgaacgttgcgtgatgatgctgttgaatagtagttgcgtagtttgtaggattgtaacatatgatgattcttcttgagaaagaagaaagaaatacatgagaggaatgtgcattgaacaggaaaatgtcagctatatatattgattttattgtgttcccaaagtcaatcccaattctgataataatgacaatcccaatcctgatgccgatgccaactatatgtgtcagctgactggtttggtcagtgacaaaggtgtttcactggtatgtgtctttggattgcccctcaacaaatctgcagtagtggttggcaaagcctaaaaatgactgcagtcctaacacgttcattggtagcgtccactgcgtcatggcggtttatcccccaatctgtctttcagactcctctcaaatgttatagcgaaggaattcagcctgtatggtatctgataggcacttcttggctttacacatatcctgaactcctgccacctctgcagagcttgccgaatgtgaccatcatagacaagctagtctgtagagaacgctcggatattgtccaagcaattcaccagcattgtgtccgaaatatcactgaagacacagtcctccattgctggaaatatgtgggttaatcagtcaagccaagctgcatagacacgtatacaagtagccacttgcaagcttggctacagtctcccatttgtctccctacttgagcctcgccaagttacatgccttaccgtaattcaatttggtatagacctttgcctaactcagctggtctgatgtcttagaaatagcagcagggaggtacaatcctttgaccatggataatattgttcagtctctggtagtttaagatagtaccagagatatctgtctttcttgtagtacaaagagtgatgggctgccagctgacaatgtagacaaccatataaaatcttttcgaatctgtgttgtttgcgctaagagggcagtcagttccttcgtcaagtgaaggcagtatttgccaaacagtagtgtagtgtcctcctgaaggttgattgctatggtcaagatttcagtggggggaaggaaatctgcctttgtcttcgagaaagggcactaccctattagggtggaagatcccattagactggtcagcaggagaggtgcaaagattacggtcattctgctaaagtaatggtcatgcattgcttctgagggcatccgtataccagagctcagtcggacatgaacagacagatttttactcgggctactctccagagatccgtatctatattttaaagaaaggagggtgggacagtgtgtgtctgattgagccgtctgctgtctctggcctcagcagtaactccttacgtagtacctccttgagacgatctggccaaggctcctcatgtattctagcggcttgagatccgaatttttgggctggtgttacgggcaatttttcgaactactatctgctgtttagcgtaattacagcacacccatccaatgtcaagctttgatgaggtgatgaggcctcagtctggatgcatggaagagcccactgttaatgctaaagagcgatcataaagtcatgctatgtcaacaacccttatggcaatatcattgtaacatctcctagcacaagtttataaggacagacttgtgcattcgccatgcttgagatctataggacttgtattgctttgtacgacttctcacaagtaaaagcttcatcactacacactctatcgagctgccatcttccagcttgtaattaggacttggctagacagagattcgctctgcaatcttgctacgtgaaatgtgtcctcaaagcgaggttgtaagttgtgcagcccatcagggcttggtatctgtagtgagtgctgttgagtcccgtggtcttgcaacgtttgagacatgtgacccagtagcctgcaatggtaatgcgctatgaaagctggacattccagttcttcaggtttggtctcctgactagaggttgatcacaatcttcgtctaatcctacgatacatgccctgtgctcctccataccggcatactctaatatacacaccaacccttcttccgcatctgctggccaaatgggtttgagagcggacttgctcggcataaagcacctctttgtagagtgtagtcaaattgcagacactgttgccgttctccacaccattgagttcttagtcagacaccaggttgcagcctcagaacaatagtgctcccggcaccacattgtaagtctgaaagttacacaacaggtgtattagcgttttatgtgccatttcgccccaagttctgtccaagccctttgcataacagcacccgaattgattggccaattgtcaatgaatgaccatgtacctactagcacgttcgtacgcgacctgcatgcggtaacgtgtgctggctgtgtctattatgaaggtgtctccgatgcacaccggctggcagatgacagtgtggctgagacttctacactgcattagtatagcacgacaggttcctctgtgagcatatgtgtaatggcgcaatgccaaattccagataaatgggttcacagagaacaggatagccaagcacacgatacaaggtgttgagacggtccagggaattacatctcccttcagccagacatcaggtgttcagactagatacggctgacgaactggaacaactggatagcaaatatccagcactgagccacagcgttggtggcagagacgaaggctaggtcgaggatgaggatgaggatgaggatgagggcatgggcaagggcaaacacaggggcaaggacaagtatggaatagaggcagacaaccaaggtcctacgtggttcaaatggtgaatgatgcatttgagcttgcccggaatcatgatgccactcattctgtaagaaggtaggaatgctccagtccacatgttatatagttcctgtttgtggtgatagctcaacagacttgatgcttgttcgatctgagtgtttcttagggacgttgtgcttatacttgctgtatttttgtgttctttacagttagttagcaagccctcaggtcaagatatcagattctatgcaatacacaacacaaatgctaccaatcaattgagcgcgtcggcattcctggcggtccaagagtgaacaggaacatctgtggcatgcaatcatgaggtctcgcaagctttgcaagggtgaaccggaaattaaactattttgaagtcacacacaggtcctccagaaatcctagttgaattcttaggcaatgaatgttctaatggtaccaccgatcctcccgggttgtgagagggaagaaacatcgcctgcattatagtgagattgtaggtgagagggaacagagacacaatgctgaatcagcctgacctgactcgtaaatctccttgtgaaatgtacacagcccagagtaccaagcacaagatctggagtcgacctgcaagaaagccagtgggccacgactggacaactccagcatgcaagtaaccctatgacactgacctggtcaatccaacccttctccaagttactcgagatgatttgaaggcgggcttccatccctgtactaccattcagatgttggatcagggcatctctagaaaagctgttgatgacaacgtcttgaaacgggggaatttaatgacatcacctatgatctctcaatgtgtccgtccttgaatagcaagcattatgaagatacaggcagcagatgactggcccccaaaaatctgcaaaaagatcaaatcgacaaagacaggatttgaacctgcgcgcccatagggcaatgcataccaagtctagacgattcgagtgcatcccattaaccactttggtactttgccaggatttcaatttctggcttttgtcccctatattctgacgctgcaactgcatatatcatcaactcgatacaatgaacctccttacttgagtaatatgaatgtggacacaaagaagcaagtagacaatgatttgatcacaattactgaaaactctcactctccatgttctacatacttgaagtcaagcatctcaccgtacaactatttggtggacaatttgtaagccggcccttgctatgtttaatagctatatttggcaaaaagctcttgatgatacagagtagtcttacggtcagagaatcaggcactacaatagcttgataagtattggccgtaatacaggggctcaaagttggctttccatgttgatccgctttgggaggaaagaggagggaccagtccgtctgctacctgccaaaattaccaacgggagacatcaacactagtccaacagggccagagatgactcacctagctttgtcaaaggcaggcgtggcgtctacaagcatgagaaaggattaagcacctgcagtcaccaggtctctagtgtcgtgatattggctgctgccaatggtgtgtagccactccttggtaatggtcgtagtcactatgtctattgtctcttgcagaagatagatgatgcttgctgtgaaaggatgatcaatgttgcttgcataaaagtaaagtagtacatggtagagggaaggaaatgaggtccagacggtctcctatatatactattctgatgagcatgtcctcctagtgtcctcccagtgtacttgcgactaggctgttgcggatttgcgactcagaagcataagtgcaactccagtcgcaaatgagtcacagatgtgcgactccagttgcataagcgcgactccagtcacatgttgaccctttgtgattgaggttgcatcctgagcatcacctatgatgtcatagcatgccaatcctcaacaagatccctgagctgctggcagcctgagaatagcagacgccatttctcgtcactactcggtcgccctacgttcttagttcttccatgcaagggcctacaacgacttgctcgttctcaggtctactctacgtgtctgaacttcctattgacaatgatgcgtgtatggtcatcccatgtgcatgtacgagacaggctatctgaacacgtggaatgtgtctctctcgcattatatgtgagtggtttgggggacctctccaatgtcatgtggcacctacctgtggagattgatcttcccctccatgaaatcactcatgactggtgatgcggactcgacacactctgaaatggaatcggtgaaacgaaggaacaactcacagaatccatttggcagaccctagcatcggtatttcaagaccgagtggcgtttgattctccctcaggcataatgagggcctcaaaagtgatcgcataaggacagctgcatgtgtcgacagatgcaacagctcctgaagtgtggatccgcttgtttgtgtagtgcaatctggcagcggagccaggacaatcacgagcttgaaggtgtttggatgtgcaatgtttgcgcaagcggtctcttgttatgagccgtggacggtagcgacggattttcatccagctcagtgcttcaattgtatcaagacaatggggtcgggttatagggtccattgagggttatatcagaatgctaccgttcagaatgcatttcatccgattacaggtggcagcacaggagaggcggtatgattgggaactgtcttgcgacttgtgccaatgaaaattcctttgagagcactctgtgcttgatccatacatgtgaacacctacatagggaaggccatatatccagtgtaatacagttggatagttgtatgggattagaccttggatagaccttggctaacgcctggttgtcccttgcaagaccgccactttgaaattcacaataggtcatagattgtgtggacagcccgtcaacctgttccctcatgaacttctgcgctgattgggctaattagcttgatgagaattgtgactatttccttctgactgtaacaataccagatcccagagagagaaaaggtgctcttacagctaatgatgtccgtctcggagttgtctcaacaccaagtctaaggctcttgacgtctttgttgaataggcaacaagggtagctaagccttgttgaggaaagtcaaaggtgaaaggtgaagaaggtgatgaaggtaagagtattgaatctggtgtcaaggggtctgacttcccataagagaagagaaaagggatgcctttcctccatctggggactcccatatatacaccaaagggctagtggtgtgtgtacaagacttgtgactagagtagtcacaaataagtgactgggttgcaaatgtttgtccacagtcgcaatagtgggacaggagtcgccaaatgtgattgtggttgcaaatgagtgatgacagtcgcatctctacactgacatgcctataatttcaaacacagagagtagccatgatcgttacagcccaaaagagaacaacaggctggatgttacggcggagcttcgctaagttgcgtcggttcaatatctgagtggcagtattggtacggattgcaggtagtctcagcaaggagcgaagccgagtttggttgctggaagcgaattcggttgagatgatacaaatccgggttgatgtacggataaggcagcggtatcactataggtaactaggatcgagtgcttggttcagtaagagcgatgagacgtctactacttaacgagtgtcctggatcctaacctcttcacaatacttcttgaagatgctgtgttgttgcaaagcagtaggcgtaaatagaatgcgatattggaacttgacctttcaagaacgttgaaacggcttcagaacaaagaaccgaatcaagggtcgagagtcgaacatctaacaaagagaagttgttgtttgctgagtcgagatgtctttgtttgatgtagtcatttgtcgagctatgaggtctctgttgaatatccatcaatgttgctattgttctctaatgttggcgatatcgaatatgcgttgtgttgatagtagcgatgatgataatgaatatgcgttgtgtcaaccgtagagggaatgacgagagcgcgcgagccggagctggcagcgtaggagccggatctccgttgctcccgtaacacgggagcgcaacaggcttgtagaggttcctgaactggtgatggaacgatcttacctggagtaacattgtacatcccgtcttgaactcccaatttaattgccgagaggtggttgcctttgccagaaatgttgcaaataggcatgccatgattgactcatggatgcaggaagcaatctcaaccacaaagcctcattctgtagaatgtacattgcacattgtactttgtacaatctacaggattcactgtaaaatgtacaggtttcaaggggttgtggagccatgaaggctaccatcagaatagtatatataggaggccaatctgtcctcattcctttttccctctcatgtactactttgcttttatgcaagcaacattgatcatccttttacaacaaggcaacatctatcatctgcaagagacaatagacatagtgactacaaccactgccaaggagtggctacacatcattggcagcagccaatatcacaacaagaaacacggaggtctcagttcaccttcaagctgtgtctatgggaacactgcaccaagttcggtttgtgaagatttgcacatccagtacctccatagcgaggtggtttgatatctgtgcttttcttgcaaggaaggtatgtccttgttcttgtcagtttcttcttcacatcgtctgtgatcatcatttgtctcttgctaggctcaccaaacaaagttgtgaaggctccacaagtcccgacaagtggagcggcaaaagcaccaggcgttgtcaagtccgcacactgcgcacactagatattgaagattggcatgctatgacatcataggtgatgctcagggtgcaatctcaatctcaagcacaaaggctcaacatgtgactggagtcacacatctgtgactcatttgcgactggagttgcacttatgcttctgagtcgcaaatccgcaacagcctagtcgcaagtacactgggaggacactaggaggacatgctcatcagaatagtatatataggagaccgtctggacctcatttccttccctctaccatgtactactttacttttatgcaagcaacattgatcatcctttcacaacaaggcatcatcagcaccaaccatagtgcctagacccagcaagtaaccaatctttgtggatctagttgtaacttcacaacagatctttcccaggacttgtgaaagtgatgtaagtatgaacgagtgttaatggatggagtatgtactcctacaatagacagtgataatgaaacagatgtacagtttgtttccctcttacaatctgggcacaccacagtatataccccacctttgttacgagcataggattcagatttcttctatttcagacatttaacaccatgaattctgtttaaagattgatcgttataagatatatttcacttcgaggtattggtcagaagctgtacagatgagaacgtaatgaatgggtgttctctctcaaaacgtcagaatcatgagaaaacgctgatactaaccagatcattgaaacagcaagctcctggaaaccagtcagatcatggattgatgcacgtcgaaaatgatgattcggcgcacaagcgtgtgtatcatgttgtaattatcaaacagcgccttaggcatatgtcaatgcttttgtaccgaagtattcctatcttgatccctgtcccaactacttctccaatggaaatttatcatgagatctctcaccctgacgcagatcagccggtccaagtactggtagttcttgtgctttccacaacgactgatctgggcttaatccctgctcaagaggaaattgttacataaccagaaggacgaactgaaggtgcattgcgcaacgtgtccgatcgaaccggaattcaggacatttttatcttgccgattgcaatgctgtatggtagcccccatgctccgtttcctacgccgacgcacatgaccagtgaaaccctggcaaacccatctaacattgcgctatatgcgtgaccagactttgtccgacgcgacatgcgttaattgagatactcggcaggtactacggcaccctcgtgcctcttcgttttgagatgtctctgcatagcgtcctttctgcgtcattgtcgcagaaattatgtaaatatcgatcagctctgcgatggatattcttatcgcattgaactaacctggaaaagatttgcccacaagagggcaccgggcatggccaactgcattgtggacggccgtattcaacccaaagcttggcatctttttcgtccagctgtcctgcttcgaccgcccttccctcattcctggcatggatcgtttcgaggtgccgagccaggtcatatgttcgatggaaatgagacgtacagcgctcataaggctgaaatccttacgaaggattagcatttgcaagctttcaacctattgcccgtgcagtggacttaccggtaaaggttccacatagtcgcaatgtacgtcaccttcttccgccggtccggctttccggcgtttggctttgcttggcataaagtcgggtcggctgctggatgaagtctcgctttttgaatcgggccccccacccgtcgcatctcctcgaatagcctttcgtttgcgaggtctttgtcgcggaccatccgattgcccttcatactcagatccggtttcggcttcgctatccgtcgtttcctggaaagtggttgccgtccgattgccctcgtcctcggacacagtatctgctagtcgtgaagcgccatttcccgcctcgtgcgaattttctaggttgctgtcgcttgacctctccttgccatctggacgataagctcgctgtaagcgggatgctgctgggttctccaattttttatcggtatgcctcccagatcttggcttgtcctcgtcgtcgctgctgtcctcctcagcgccacgacggggggttgcaatgccggtgctggtcgagccatccccataacctttccctcccactgtgatactgcccgaacgattcccgtctcgggtttcgctcgtagtgtaccccttgccgcctccgtagccgtgtccatagtctcccccatcctcggcagctgtagattgatcgctcggatcgacaaaacgggtgcttcgcttcggactgactggtccggagaaccggacgttaccagggccccggttgttcgcctcgtcgtcgctgtcaaaggaggacgaactgctgggactcataggcggaaaggtcggagcatcggttcctgctctgaaggtgaactgagcgttcgaaacggggattgaggaatacgttgtagagccagcaccaaaagcgaaaggattgttcgccatccgatcgaacctctggacatcactccaaacaggaaagagcccttttgtgctcttgtccgacatagtccccctttccatggcgctggaaaagccagatcggggggagctacctccgcgatcggaagctcttaacgaggtgtctggcagtaccatgggcgaactgatatcttcctcttcggagctagtagacgcgaaactgtcggctgtctcctggcgcagtcgaggcctacttttcgtccaaccttctcccttgtctccagcttgagatgacggcgaaggaggcaccctgccactacctaattgaccgcctgtaccgccgaatccaagagcaatagcacgaacgcctggactgtccttgacagcgtttggtgaggagttggacgctccggaaatatgtggcgacggaggaagcggaatctgatgtggttgtatggtcgcggccgttgagcctagcctggaatgacccaagcgacgattgcctcccgcggcgggcattcccggaaacaacctcatctccttgccgtcagaggttattgtatcacccaacatgagggcgtcgtcgcttgccatactgagcgtggggctgtccttctcgccagtatttcgcaaagccggacttgtgttatacccaggtatcatggagggcatcggcgtatttgaggccgaaacaccagggaaagaaatagaaccttgaggccgtttgctgatatgctgcgggtctgacgtagaaaggtaatagcgcccaagaggtgacggttcatgtgagcggtttgacaaaggctgcgttggcgccttgttctgttcatgggcagggttggcggcattgccgacgagtagtgagggtcttggcgtcatcaaggagtgaaaagcttctccagcttcgttaccaggcaaactcgacgagatgtgcgccaatccgttgtcagcagcttcgctcgtcgatggagtttgatctggagtatcgagggggtgagcatcagagggattaggcaaagacaagtcgtcacactcactgttcgagatgttactacctggatatgaccgtccatataggccatctcttgaagatccggcggtaacccctagagagggcagcaagtgatggagacccggatttgttccgggtgaagtgccaaagtcctcttgtatacgaacagcaggggattcccgttcgagcggaagaggcgcatgagatatgttaggcgagtgttgaggggatgagcgatccctggaatgatggtgattagcaacgtcactgatgaattcccagccgcacattcgtgactcaccctcctctccatgtttgctccgctgactgcgaagggtccaaacgattcgtttgcgttcgagaatccagctgggagccgagatggcgccttgcttcaggggtcatgtccatctcatcaggtccatcctctggaccatcatcgaacagttgatcggaccaaaaggagggatctatatgagtgggatcgggcgacatggctggtatccctgaaaagcgtttctggtccgttcctggcgacaccaggcgttctgctccgttgggcgatattttagccttgtacagtctccgccgcgtactcccaaatgatcctcgctgcttgctccaccgcttgataggctttgtcgtttgttgctttccaaggcgagtgacaagaacggcgagccgacagacactgcggacgtgctgtgacgtagtcctgtccaattcgacccctctgaagataccgagtgggtgaagatgggggattgggttccccgtgcgaccgtatcgtcgctccttcaggtggaagctcggacggagatagaaatccgccagcttgattgtgtttcgtcggatcgattctactactgcatgagaagcgacgctctaaacagagacgtggttaaatggactgggcagcgtctaggaaatgagcgaggaacacaagaggtcaagtggtagaagctcagcgactttcgtttacaaggttctgacgagcaaaggtgctacttacaagtgctcctaggtcggtgtatcgaagcgaccaatcgtgcctgagcacagagttatggatgatggaaatcccggcaacagctatggcgctatcgctctgatcttgctattctctgtccggcaagcaattcgagcgctatcaaggaatgcaatgcaacaataactctgtcctctggatcgagttcgaagtttggtatagaggtgtaatctggcgtatgcacaaggatcagaaaggtcatcgagaacaggagcaagtatggtaggtcggacttggcgcggaccgatttcggctccttgccctagcctttgccttccccgcgtccttgatccccatattcgtaagatcgtaagataatcaatcacccggggatgacgtgggatcggagatcgggacggcccagatcgacagtgaatgcgcaacagggaataggagtgaggctgattggaacaggagacctcctcgcaacggcatccgtcgtgcgggacaagaacgtacctgctctttgctcacgatgtatgctaggactcagcagcctgttgggatcgtcgatctacgcgctctgcccgaggggggcactgcatccacgaccagggtcgaacccagtgtgagatgggactcgcttcacatgccaatcgaaacaatcaagcgtaaggcgagcagagatcaggtctaggtactgaaaacatggacactggccaagtccgagcgtgcgtgtagagcgccataagtgatagacatgtagtttgtaacgcatcaaccgaaatgaaccggttggcccaagcatccgtgaccacaattcacaacggtgtcgaaacggtagacacttcatagatgccagcatgggcacaaaagtacgagctcttcaatctcaactcaagagtacatcccagtatattcctctctgtgcgcctgccgttcttctgattcaccattttgtgccggacctgcattgccgtttgaccggcgtgttcctgaaagcaaacgttgaaagagctcaagcatgagggaggggtttccgtccgggtcactctcctcgccgttggtagccctgattgtggggtccatgacggtccgacacatggggcatgtgttttgctggcaacgggaaggtggtcaaggctggctggtcttcgttgcgtaagacctcgctgacgggtcgtgaacttacaagtagcaaccatttcctggcacaccggccgcacaggatatgcccgcctgacagcgtattcccagtgattttgtcgttgtggcaaggcagacggcgtagccccaagtctgcatttgcgccacccacatagtggtctgtcgcttcggcatattcttcttccgtcaaaatctcagcataggaaagctgacagacgggacagctctgagcatctgtctcaccacaggaggcagacgggtgagcttaatgtttcttcttcccttgatccgaagctcacacaggtcctccccccgttgtctcagctgcgtctccgtcacatgttcaagtccttcgataaagccatcagacgctccattcctcctgtaaatgcgagagtcttgagtgtgtcaacacaagatttgcggtatgacgaaacccggagcaatgacgaacgtagtagtaccatctccgaagatatcttcccagagatcggcgtcaatcatcagcggattctctgggtcatcggcttggaccagggacatgaattcggcgaaatttggatgactaggctgttccggaacggtaacttgtgggttctgcgcggcaccagacatgttacttcctgggggattttacgaatgatggaatgagccctgaagatcgagggagatttaaagggacgtctaggtctgacctgaaatcgttaccgtcaagataccaatctctagaaatatcggaaagggtgacaccctgcaacaccgtagacgcccacttgtgctagatgccgtccgtttgattgtgtggagctctgtgatctgtgacgagcgagcctatgtgcgaggtatgacagccgcggtccaattttgatttgaattgaaagcaacctcgacttcgattatcgatgaacgatgtttctcagtcgcacacgtcatgcatgcagagtgatatgcatgatgatggccgagacaagcgttcgacagggaaacgccggaaccgagtccctaggctcggcaacttctttccctctaacggcatcctcttcctcacgcgccgcaataataaaatgcacacctgttgctgttggctgttggcctgtctgctccctgttccattggtctatccgatatgttcactcgctttaatcgaccggttggaggctagagctggctcttaatcgtgttggtactcgcaggccaagagcgatgccgaacggtctcgaggggcaggtcgagcagcatgcatggtaatcatgtcggaagggtgtcagagcacgaatcccgactaactcccatgcgtgcttgtgatctgcgttgcgaggactcggggactggggtggccgagaccaaccaaacctggggtatagggtagaggcagaccaagggtggccgagaccgtctctctcgcctccgagcgagttactgtggcttgtggagaggagtgtgagaacgtgtacacagcatcaccccgcaataaacgagggcggtgccgcgactagcgagtagcgattaaagcctaggcgacgtttgagggtctttcgtatcgcaacaaagcagctagcagctaactaagcggacgaatcgccagtggtccgaccaaccattcccgactcgtatcccgccgactcgaccgctcgagagccttcacatgccggtcgataccatctctcatctgcatccaagtggcttcgagctatagactaatctacgccaggtgcattgctcagttgttagcaagcaaactaaatacgtgccggtaggggcgagaccaccaattcacctcatccagaggattcctgctcgtaccccaggcaaaacaacctcacgacatacatcttgacgacccgaccgtagtttcaccgcatcccgcatataactgatatctcggcggccagcaggaaaaagatcttgaaccgtaactagagaccaatcctatcgactggagcgttcgagaacaggattacgcctacaaccgcgagccattcactcaggtcgaacaaccgaaaagctagggacgctgccttgcttctgctatttgcaatgaattgagatcttgcactaccgtacatctgttatacactctcgggatcgacagaaaacaagccgatctggaggtcccacaccggtagcgaattccattcccggattccatgagctctccgtcgaccgctgtgccgcatgcacagcctatgaggagttcggccttgtctagcaaccatcccacaagcaatttcaaggtgctgtcgagaccctctccggcaataaataccacaggactctatcagcctgtcgacttgggccgaaatgagagcctgaataactctgctgccaccacgcagcggtccgatatctccagacttcatgcgggagacttggtgacctccccgacatccgattcggctcatcaacatcctttatacctgggtcttacatcgcctgccgagtcgcaacagagttcaggtgttccagggcttagcgatagccgaggcactaccatcgattcgatctcgcccacaccagtgtccacacaccgtccttcatcaaggttgtcagtcaatgactcacttcctgttcgcaaggaagacgcattccgaaaggaggaagaactatccgaagaggaccgagacgagagcacaggcagtcaaacaccgcgaagaagaggcagtggaacgttcggattcgggttcagtctggctcgaagaccgtctgacagactcggtgagcctcgacgctgtcggacgtctggcatgcgcccatatcccgtcattcatgttcaaatcgttattacagagcattcgaggccggtcgatactgcaagcttccacaatcaatacgatcagcggagtggaacgccgcgccgtcctagccttttgacgcagcaaatactgtcatcccctgccgtgcctttagcctgcaataccacggcatcgtcatcagatcgtggcgaccacggcttaatcaggagacccagcttgaaagatcgtgtcaaaggtagcctgttaggatcggtcaccgcatctcgggacttcgccagtgctatagtgacaggcgaaagctcgaatcagccttcggggacatcggcgagccgcgaggtgcaatcggacgcacggcgtgagcgcaaagggtcatcaactacgtacatgtcatcacgcccgagcttggatctggatgagcatctcgaggagctggtcgatgagggctggccgcaggggacccgagcgaggccaagtgggacaaggcgcaagacttacaacgaaggaagtagccacgatgatatgcgctctagctatacatatgggaccagtgctagcggctgggatcgcagtgtgacgggactgaccaccgatgatgatgaaggagtgtaagtacgctcatgttttcgttccacttgaacatctaaaactgatagcgctccgggtgtggtatctggcaggatcgaaacccaggacatcaatttcaccaaagatgctcgtactggaagaaaaatgatcaaccaatacgtcgtgagtcagcttgccagaggttcgcgctcgagcatgtcggcgtggactcatagctttcgaagtacagattttacgcgaaataggtcgtgggcaacacggccaagtacgtttgggacaggatgttactgtattggataagctggagaagtctcgaaccgatctcaacctgacctcggcgggttctcatcataccgccgacatcactggtcacgcgcgcacattgtcgtggactgagagtgtatcaccctcgaccggattggacagcggtcttggactcggcaacacatcgagtgcagcggcaaacggctattgggccatcaagatcatggaccgtcagccacgcaagaaactgccaggcattagaaagtcaaccgggttgctgcccaatgggccgagcgatgccaagcagatcatagctacgaacgaaaagtagtcttcaatttccacttcgaagattttatcgtttaggtgactgactaagttgtctgcacaggctacgtaaggagatcgcgatcttgaagaaatgtcgtcatccgaacgtggttcgactgcgggaggtcatcgatgcaccggcgtcaaagaagatttacctcggtgagtgctagatgtacgaacgtggcacggacatgtctgaaaggtcatattgctgctagtgctggagtactgtgaaggtggcgaggttcgatggaagaccgaggacgggcatccattgcttacccttgatcaagcccgaaggactatacgggatatcgtcctgggcctagagtatcgtgagtgcgcttctttccctttttctgtcgaaaccgtccgatcttcaaagcctgatcgccctttgcaactcacgatatagtccaccatcagggtatcatacacagagacattaaacctgccaatctgctttattccgctgatggcgctgtgaagatctccgacttcggtgtatcccactattctcacgtattacgcggtcaacaagcaagggaagatgacgcctcaccagaggaagacgaggagctggggttcacgaacgaacacgacctggccaagacagcaggttccccggcctttttcgcaccagaactctgtttcagcgatttagggccgcctagcggaggcaactcgccaattcgcgaatcgtcaatgtacaacttcaacggcccagtcaccctatcggacgataagcctgggaacaggtcatctatcaattcagctaattccacaagcaatacgctgcgtccggattcgccttctgccaagagggagagaccgcccattaccgaggcgatcgatatctgggctttaggagtgacgctctactgttttctcttcggcaaagtgccattcgattctacaagcgaattccacctgttatccatcattccggtcgaagacttcccggtaccagccacgatgggggcagatcatataccgaccggtggtcgcactggatacttgagaggtcccagccacggcataactcaagaggcgtgcgaggcgatcgatcttttatcgagattactggagaaagatcccaccaagcgaatcagactcgccgacgtcaaagtgagtgcggatatctcccatctggctttacattttacaaagtaggcctgatgtatctccaaattcattctcagaaacatcccttcacccttcgtggtctttcggacacttcagcgtggctggccagcaccgatcccgcctcagagcatttcgttacagtatccaacgccgaggtggcagccgctgtgacgaactcaggatctttccgcgagaaagtgcgcaaaagcatgaggaacctgtccaaccgtctattcgggacaagcgtccctgccacgaaaagcagatcgcgaagtcatagcgtcgttcagctggtggacaccgacctttctgcgtctctagcgcaaagcggcaactctcacgtaatagggcacaacaacgcgggatccttgaatagatctcagtctcgctttacttcaggttgggctcatcggctccccttgccctacccagatgggaaagaaaagcgttcgccgtctccccacccaaacggtctagccaggagattctcagtcttgggtagcaggtcgaatcggtcattatcgccgttgcccggcacgagtgatttgccgattgctggcggattggcaaacaccgggagcgctattcatcgcgtagacccggacgcattgggtcgaagcgtgtccgaccgttccacaacttcgtccaccggccaccttccgattggccgtatggggcccctccgtcgccaatcgacacatctcgtaccaccagtcgtcgggaattttgagcttcagccacagcattcgcgcaacgtgttgtcgacctcaaattccgtcgaacgtttggattccataaacaagaagctatcgactgatggatccgacttgtcactagcggattccccccgtagcagggccagggctccaagcaacgcgagctcggcggccggcattgcgactgggaatggtttgcataacaagcttgctaagttactttctcgtggagctggcgaaaaggcctcgggtccagctcaaccctctgtcaatgaacaagctatataccgaaacgacgacgaagctggaaacctgcagcacaaggtcttgaggacgaaatccgaggctcacacggatgcagtcctgcgctcgcatgccagtggaaactcgatcgcttcaaattttgccagctctacaagacccgatagcccgcttgttgaggagtccaagcagtttgcaacactgacccagggcaaccacgattcccagccatccaacgttcacgagcagctaccagctgcagataacgactttgacaaagcggactgggaaggtgatctgtctgacgatgacgacgactacggcgaaccggtgaagtcagtctatagtcggccggaccaggacgggacattgggtcttggtccgagagatctggacgagttggatagaggcacttgggtcatgagtgggagaggttggcaacaccgggaaacgactgaacccgctgggacattattatcaagcgtcatacctcgcgatgccaacatggagacaaatggggatctgcaactagatataggagcgatcatgcccgatcctggtttctccccctcagatgtacccgcgacgatagcagagaccgacgctgaattcgacgggacactcagccctcgagctgttacctcttcttaccctctggcaaccgtcgaaagtcgcccggcgatcggaaaattttcacccacatctcctcgacaggctttcaggtccgagcagggacgaacagcaaggctttcaccaggtgcaaaaacaagagcgattaccgaacagcggtggacagatcggccgtggctttcgtcgtctaacgagatgttcgacgatgccgaggaggacgacgaagatgacgggttggagatcgatgttggactgaagaggggacgaaggtcttccaagccattgactcccgcaatgggtcgtcgaccctcattaccgacagtcgattgatggcatggtgtcatcaagtatcgcgagacaaaccgcatgtgtaatatcttacgagcatcacgatcaacatgaatgacccttgactatccagactgatcaattcttcaccgtcaggttgacgttatcgcgacatagctagtagtgaatggtatgcttggtgtcattatatgatccctctcacagaatggtatggctggaaagctggaaagaagtacaattgataaccctggtatctcggctgctgctcatgctttcttcacgttcacctgtccggttccgatggcggataagtgccagcgtctcgcaagaccgccaatccgcctccatctgcgatctgggcttcgatgtccaaaccagtcgtagaacaaagttgagatctttcttcgccaagttccgtacgccgcacgagtatattgctgggtgggggccaggactccggattgacagacattcgttcagagactacgtggccacgatagtaactctttctactgcgcttcgtgtagtcaaataccgtgaaactgccgacggccacgtaaatgtcagtggactggatcgaccatctatgatgtttggctgttccggtccacttactgctcttccatcaagcgcatctctttgctaagaccgtcgatgttagcgttaggattccgcttgcgggccttgagagggttctcttccaagagcagctcctccagctcgtgagtggcgtcgaagtttgccttttttgactgcatacgtgaaacgggaaatcagcaagagatcgatgatgacctgaagccacaaactgacgtcaggttcaaacggcgggatcgctgtcttgcttccgattgcctcccaatcgaggccggcaaaccacggttgagcccgaaggttactgagcgcgcttccatcggaccgatagcctagacgcctatttggatcccgctcgagcagcttcaaatgcaaagtcagttgcaagtggatgacagtataagatcaagtactacttacgctacgcacaacgtgcataccttcaggcgatattcgtgtggatgcatctccaggccatgtaaggggttctctcaagatggcctcggttaaattggtgtttgttctgccccgaaatggtcgtttcccgaaaagcaattcgtatcttttggcaagatgggacagaaagtgatagaggttagtcacatcggaagacctgcatcgtccaagcctagtacacgtacgcgcatacgcccaaagaccaccagtcgaccggagctgaatagcctttcttggtcaagacttccggtgctggaagcatttgcggatatcaacacagtgagctaagctgactggtcgatcttcgatcgagcgtacccatatatgcgagactcccggcaactccagttagcaatctcttgtcggagaaatgcacggcaatattgaaatccgtcagatggacatgccctctctcgtccaggaggatgttgtccggcttaatgtcgctgttaagagcagaattacagcgttaccgaggcggaggaggattgaacctgatccaagcttaccgatgtacgatttttttactgtgtaaataatcgatagcgagtgcgatctcactgatatagaaacgaaccacttcttccgacagaaggccttgtcgctcaagatggactggacacgagagcgtgtgagccttcggtccgctggcaagcttggtgattctcaccacgccgacaactcacacctgaggtctccacctaacataaggtccaggacgaagaaacagttctcgtcatcttgaaaggcgtatctcaagttgacgacaaatggatgatcgatctggagcccagagtaagctgtgattaagctaagttaagtgcccttgggacttacttcttctaacaacctacgctcctggacaatgttggcgacagccttcatcttgacgcatttttgcttgttgatgtacttgagcgcatatagcgtttttgattgcttgtgctgaacaactcgaacctaaacgaaccgatcatcaagacctcacctcaaggagtacgttatggcttctactcaccttcccaaaggcaccttttccaacgctccgcagaaggaagaagtggaaaaggttgacttccccatcaaagtcgatagcctagagttgcgcagccgtcagagcgacgcacatcagctctgccggaacatactcacttcgggacggcaacaggcagcccccatatcgaacgggttggatggattgaatcaacctcgaagagaccgtcccctagtggctatacgatagatccggtgtgataatctcggagaggggtgtccgagatgcgataccagaggtcctgccgtttggccgatttgcataacagacgatgttcccgagtctgcccagataagggaatagcccggatcaccagaagctatacggtgtaacgagtgtgttgcctagcttctgaaattgtcaaactgaaaattgccgagataagggatgcttgagaacgacacagcgacagcttagatggcggtattgcagtgcatcgctaccgacaggagtggcagggtgtatcgtcctgaacgtttctaggtatattgggacccagacgatgatacgtcaagatctgagacagctgactagatgctcaatgttgagccagttgaaaggccactgccatgttaagctatggaggcatggaggacaaggcgaccttcctgtttgatggcatccaagatccatcccctcgataccctcggcctgtgtcgctgccccgcgtgaggcctcgtctcggtgacgcgtgctctctaaaagggttccgccggcccctttttgttctcttgatctcttgctgttctcgtattcgcgaaaacgctactcgacaaggagaggagggcgcaaatgctgagaatggtcatatatctctatgggatttgatattcgtttcccgttcactgtcgcatctactaatgccttgcatttttactgatcgctgtactgctactgcagatcgtcgccctgcgacaacgttggataccacaagtggctcggcacacgatcactgcgagattcaaccagcgatcggtcgtactcagcgcatccaagcatggagctctgcctccttaaacagtgttctgacattcttgagatgcttcgctttcctggcaacgggaacgctgagcactgtagctaagcattcgaccaggtcctcatgctccacgatatccccgcactgcgtatccaaaatagtctgaatcgatattgtgaagagacaatggatcacattacgtaccaagcgaagaagatcgcctacgatccgagctcgaactcgaccttttgccgggtcgaaggcgtaccctccggagaggaatgtcagcttcataatggtctcgggaaacgtgagggacaaggttggtcccaattgcgctcgcaacatagatgatgacgctgaacagcgattgccagctcagctggcgtcagatgacctttcctagccagtgggacttactgactgcgtcgtcaccttgagatcgatggctctcatcctgtttatccttccgccagagctcaacgagccatgctagaactcgccagcccccgtcttcaattttgtattcgttttgagaatccgctcgcccggtgaggatgaggccccataccatcccgccaaactgttcgccccgctccgccatgaacgccttcgatgctcggaacacacatttcgataacccagagtctgggtaatccaggaggtcttgcgtgcgttgcccgcaggggatcgcatccaccagtgaagaagcccgatgcacctgcgagaccaaggaatgcagcgtgcgatttgtctccgcaaccagagactcccgtgaccttgacccggcttgatgtacgtcactcggcagaagatagctgaaatgctgctcagggatgatgaataacaaaacatgtacatgtttgctatgatctgaaagcgatcagctccgggaatatactcagtcttgccgggcatgtatgactaacgtgattggacgatatccagcgcaaaggaactgagatatgcctcgaactccagcttgcactatcagcatacgaatggagtcatgacgctgtcccgtaactggaatatcctgataaaggaggaccttgattacttacgttctcgttcgtcgaaccgagaatctatgatgctagaccattcataaggaaatagcgaatcgattggcggctccttcctggtatttgggcgatccacggactcgtcacgcgactggcgaggggactgcgagacaacagagactcaatgcctggatttgtatgaccggaaagcgagcagcggttgatcattggcaaggcgggaataagggtagagtctccagcccgagtgtaaatggtctgacgttgaacgcccggctcgacgaacgtccagcctgatgacgaatgatgcgggaccggacgactccagtcgtgttgtgggtgccctttctggggcaatcgatatggagaatttaaaagtcgctcacctccattgtgccgctgtgtatgcatctcggaatgtatgtatcctcactcggatcactcggcggcgacggacaatatatcatgatgtcgaaggtcaaatcgcactccctttcaagttgtttgccgtgctcatgaacgctcgacatccctgacctgtcctgtcacgtggtaatgaattatgttattgggtgatggacaatcgtaacaagttgacatgtccgcgaatctactctgcactctttgctgctgggataccaaagtaatttcgccgatcgccgagctgatgcaaaagggagcgtgcttttcaatgatatgccagattacaaactaggatctaacaagcacgtccataatttcattgcaccgctagcctcaatcaagtttctcccaatcgctgtattcgccaaatcgatggtcgataaggcgatcgcagggatcgacgagctgaccagatcaaaaacgcagaactgatgatgatgatgagcggagaaataaacaccaccaactggctactggcgcgcgagttgagcggataaacgtcggtaaattagaattcatatgcttcatgtgcatgcaaggccggcgaaacagatgggtgcggaccctctaggctgtaggtcggtgctggcgtaccaataatggatgcttataagagctaccaaagcttcaggttcagggggagggatggttctgcccagctctccgttcaacaggagctgatatagaaccagtccgtcatcgatcatctcacctttccccgatcctcgaagcgatatcttgagcggataccagcgcaatggaaagcacaaccgccatctctgacaactggtcctacactcgtctgacacccacaagggttccggatggaccccaggcaagcactgtcgagcagaaggaggaagaatggcattcggttcacagattccctacgggtatccacgtcgagctgatgaagaggaaggtaattcctgatcactgtaaaggcttgaacgaatgggatatccaggtaagaccatttctccccatccattgcgaacgatctcaccgaatctgattggattcaatcttgcagtgggttggagaatcggattggcgattcaagaccaccttcgagatcaccaaggagcaagccaagcaagataacgtagatgtcatttttgagggcttagataccttttgccatgtcgagatcgtgagtttcgcgaatcggacttcaaactaactcaacccatgattgacccgtgttgcatctcaaaaggacggcaaagaggtactctacgcttccaatatgtttcagacctatcgaatcccggtcaaggactttggtgaaggcgaacacactctcgttcttacctttccctcggcttggtatgaagccaagaggatcgaaaccgctgagatggagaagaatctccccgagaacacagaccctacaacaggcgagcagaagaagctcaccttctggaacggcgattcatcccgactgtacgcgcgaaaggctcaatacggttggggctgggattggggtccagtcgtcatgacagtaggaccgtggagtaagtcatgttgctgtaaatgtgaacgatttgcaatcgctgattgcagtcacgagcagagccgattcacatccatgcctatacatccaaaatcaccagcaaccggatcgacaccgtactcgattcttcgctcaagactgcgaaattgcgctctacgctccgagtctcccatgcgctcgaaggctctactgtggatatcagcttggtagacggttccggaaaattgatcaagtctgcatcggtcaaagtggatgcgaacggcgaggcagaagtcgaatgggactttaccatcggcaatgatgtcgagctgtggtggcctgttggacaagggaaacagccactctacaaggtgtctgcagaattgaagcttcaggttcgtagaatccggaagttgttctcgatcactcggcgattcttactcgtctatcaataggacgggactttggtagccaggaggaatgatcgcgtcggtttcaggacgataaaagtcgtacaagaaagtctcattgacgctcccggctcgagcttcttgttcgaagtcaacggtcgaagggtgttctgtggaggttagtcagccgaccgattctcctcaactcaccctagggctaagatgctgtcattcaccgacaggttcgaactggatcccggccgacaaccatcttaccgaatgcacagaagagcgataccgcgcttggcttcagctcatggtggacgggaatcagaacatggtccgagtgtggggaggcggggtctacgaatttgactatttctacgacatttgcgacgagcttggactcttggtctggcaagatttcatgttcggatgtggtcaataccctgccaatgaagaacttctgaagtctgtgcaactggaagcggagcaggcagtagagagcttgcgcaaccatgcgagtcttgccatctttgtaggttcccgcacgtcaatacagcgtcgaatgcaatcgctaacatctggaggctgtctgcgataggctggtaacaacgaagactaccagttgatcgagtcaatgggcatcgtggtagattacgaggataccacgaccgactttaccaaaaccaacttcccggcgtgagtcatcataatgagacggaagaggggggtgtgctaaataatacatctcatagacgtcacatctacgagaagctattgccaggcgttgtcagctccctctgtgagacgtactatcacccctcaagtccctttggcgggcagaccagtggcgataagacggtcggggacttgcatcaatggagtacgggcatgaggcgtgatgtaggtgctgctagtggctgacaagctttcccccttcttcctgtagacgtttggcatggaagccaagagccctggcacaattgggacatccttgcaggtcgcttcgtttcagaatttggcatggagggatacccggacatccgtacggtcgactactggctagacggcaaccaaaaggaacggttcccgcagtctcggactaattgctctcacaacaaagctgttagtatttccctcgactgtcattcaactgtcaccacgactgacctggctatgccatcgatcaggacggcttcgagcgacggtgagacagattccccttaccaccaatgtcttctctcgctgacctccacgacacgatccatccagcctcgaactgtatctgatggagaatttccgccatgcctttgacatggagagctacgtatattacacccaggtgatgcaagccgagaccctagcggccgcttacaggcaagtcgtgcggtctaaaacggaaaacagctgggatcaattctgattccgacttgccgcatacaggctctggcgtcgtaactggaaaggcaaggggaaggagctgacgtctggcgccttggtctggcaaagtaagtcgaccggccaagacttagctcgtgtgcttgatggccttcctgagctaacccatcctcgattgcttgtagttaatgtatgaagctcgatattcgggttctttgactctgcgcgtattgcgcatgaagctgactctggctgacctctaacaggactgttggccgaccacgagttgggcgatcgtcgactatttcatgcgtcccaaaccggcattctttgccatcgcaagggagctgcgcccctttactgtcggcatggctcgaaaggatgtcaagacactagacaatcccagctcggaagcattctttaagatcgagcagagtgtgagcttgcatcaggtttgtagggatgtcagtctgctgagcttacccttgatcgtcagctcgaaatctggggaaacaattcatctattgaagagaaaacggccacattggaagtggtatcgttcgatctggacgaaggaaaagtagtcgattcccgatcgagtaccgttgtcctggcgcccaacgcatccaccgaattttttaagggcaacgtcgctggtcagcccactagaacctcggcagctcagctacccaagatcatcgttgttggcgcgaggctgatcgatcaagacggaaccgtactagcacgatatggtgagaggcttgctgcgcagaacaatttcactgtgcttacgcaagcttctttgcatcgtccctgaagcgaactggccggagccttggaaatacatccagttccctgaggtcggcctcagtatcgacacggcgagtgacggcgagaccctgacgctgtcatgtaagcggcctatcaagggtgttatcctggacgtcgaggaccgtagttccgatgcagagagcggcgaagttagatggtccgatcaggcgatcgatatgatgcccggagacgaccagattgtcgttgccaagggtttgaagggcaggaaagtcaaagctagggtgagctattgggcatttccaggcaacgagaatcgtcactaacttgatgtactgcagttcctcggggacgggtcagcatgaagcgtaaagatcaggtgaaagtgctatacagacggagacaagccctgcatgtgcagtccgtgacgcgacagaatgtatgagatcgatcgtatgaagtatttacaacgagacgaagggcgccaagtgtagcgccccttacaaggttctggtagatgcgtggcccgaataagatgactggtaacctagattccgtaaatggccagctgcttcatctcgcccaatgttgattctacctgggcgtcgagctgtccattagcatattcgtctcgaatgttttcggcgaagtagctgatggcgtgcccaaagcaatactgttagtagctgtataatgccccaggtagtgtcagagccgcaatcaccgttgaacaccggcgagttttgcgtatccttcctctgcaaatctcaattggcatcgcaccatcgcttcgaaagatgggtccaggtatgctaatgagggcatcgaggattagttgcaaccctaggtagagtcagacggcgagggtgactgacgtatacggagctcaaccaattgtggtaattcctcgatgagctgagtgttcaagacttcgaagatctccttggcttcgtcatgttcttgttgagcctgtcgcgcacgggcccgatcaatacgagatgcgcctactggagtccgctaaactcacccgaggcagtttggcggtgtcctcggcaggcttgtccacgagcttcctgacctttgacctggacgcatcgtaatccagcatctatgggtgagggagggacatctatcagctttgacgtaccgccccgacctgtggcttcaatcaacataccttcttattcctcttggcgatagcatcgttgatagccgggtaataactacacaatttaccaacaggttccaagacggtagctctaaatggagcatccagatccctgcctacgccaatatccaattcatccacggcggatttgtatgcatgtccggccattgcaccctgttgacggcgtcggactcaggcacttgcccctgcacgttgggatctgagctctacttacgtcggacgtcctatcggcagtgtagaacatctcgagggtttcggcgatacggctttgcgaagcggacattgctgcggaaaggctacagagtcaatctcgatgagagggataccgcatcgttcggacactcacatcgcatggcatcaaggtaagcctttgcctctttctgcagctccgtcgtttcccgctccatactgctcaaaccagcaagcgatgtcgtcgtgatatttagcgactgactgaaatggatcgacaggcactaggacccacgtcctgtatctgccctcctcttcggcaaattctcggtcaacggtcctctcgatctgaccagtcttctgcatgatctgcgtgcccgctcgggacgccgccttcttgaaactgtatatacgggtggacgtgtaccaaaggagcgtaggatgtttcgaggcagatgggtaggacaggcgaattaggcatatggatcggttaaaagcaggccagcagggtcgacttgtcagcaatcaaggtagacgttgaacatatgagacttctgtagagtaaaactcaccctcccctacagcaagacaagagtgcgacgagtcgacaacctatcagtacgatgggcctaacaggaagcacagcgttgcgcagtctttgctcaccaggacattttgggagtcggactgctggaagaggcggattaggatacgacgtagctcgatataagaagctcaacactttcaaggatgcaagaagccgtttcttcgggtattgacgcaattgatacaagcccactctgtatcttgggaccacctacctctcaacgtgctcgaccttcgggtgacgaatccctgtccctctctacggtccagcgacatcccttcccccttccgtcgactcggatccgagctggtagcctccgtaagcgctagtacgtaatattgcgctttcagcgggtcccactcttttgggttcgatctggaaggaaggcttggcgctcggccttctcattcgggtgatgacgatgatgacgatggtgacgatgatgcttccgatcccgattccggtcatcgtcatcgtcatagctgtaagcaagtcggcacagcggtagctgcacgcgccatgcgcgatgatgatggtatcctggttcaagcagcacatccgggtagttcgcagccctcgggttctgccctcgaggggtagcgccccgagcccgccttggaaggacgggcatgtgatctgacagcacaagttgtagcaggtagggagaagaatgagccaaacgagtatatagaccccgggcaatcaagcttcgagcgggattcgccccccggaaactctgttggatttgtggtttcatcttacgcacgaccgagcattcgtcaacgaaagccacaacctacaatcaatcacacacgcacccccagacatacgcacacatattctacctccgtcatcatgactaccagtcttctcaaacgctcatccgtggtcggcttggccggcatcgttacactgatgtcgctcatcccgactgccgaagcgcaatacaggcgaccttatggctattacgggaacaacaggcgtggaggttggcgcaacatttatctgttggcaatgtgagtgtcgaacatcatccctttctctacgtgccagatgctgatttgtgccgccctgcccccacagcattctggtcagtatcgagacttgtcttaggtgtcaattctccgttctatgctgatttgcgttcgtccgttcctgcagcccgtcatattcttcgctgtcgtcgtcctcttctggttcttcgtcttcagaaagatccttgcgcgaaggcgtcagcgacacgccgaggtgcttccttcgcacaactcgagcgctcagtaccctcaatccaacgagtactccaacccgtacacctcgggtaacactggatacgacaacaacacgtacaactacggtcagcagcaacaagacatgacgcagtaccctcagcaagcccatgtttacaacggaggtcaacaacaatacgctcctccccccggaaaaccccctcagggatactagcctcgcgggcgcaagaggcgtgacgaatgaacacttataatcccgacgatcggtccgcagcgtacattcagggggctgagcgaatgactgtatctaataactttgtacataccctgtagccatgaccgatacacgccatcatgtcttgtcgccacctttgttcgtgattagaagagttacttgcgactctgaacgaattcgtccagagcgatggtaggcgtcactgcgcacagccatgttggcatgcgccactcatcagcggttgagacgcctgcgtctgatcattgtgtctcgttcatcgagacatggtagacgctgaaagaccgttcggtcgggttgatcaggacaggctggttcaagccgggcgacacgatacaagagtccgaatggagcgataagcgagcgtcttcagacagaaatgatcctgctgactagcagatgattcgcattactcgacttctagtttcacaaaaagatgtttccaagtatccggtcaaattacaacgtgatagctgctctcactatatcactctttacgacacaagctgatctattcgaagtgtacaggcttttcccgccatcatagtccacgcaaaccgctcaagtccatcgggacttttcccagtgcgggtctgaaagcacgagcggaaggtaagcagtatcatcagctatcacgttcctttgtagtataaatccaccgcttaccctgcaagaaagcacagaggaccttggatccggtctgcaatgccattcggttatcagcatgatgactttcaggaacagctcgccgagattgaaccctacctggagcaacggatgtcctgccacgatctctaggaagcgctgcaatgccgcttgtctcttatcgataagatcctctgaaaagcgattcgtgaatacctaattcgcaagtagacggatggtttagttcaactttaggtcaacaagcgggctcgaatcagcgaaaggcttaccttgcccggtagcgtagggatgttgacccgcgtgctctctctttccaagatgtctctgaaggcttcgaagtcactatagcgacgcctgactacggaagtctccagcttgaatgcaggtatgttcgtcttgatattggaaagggattcatgtttcaatgagcaccttgccgtctcgcattactgtgttctcaagctcaccctggtcataatctcatagtctgtaaacatcttcctgcctacacctgaaggtttgcctatacagtcagcagtgagccgtaaagcaattgacggcgtttacacgcaccatgcgtttgtgggttccgaacttcgatttctaggaaagattccggtggcgcgtacatttcgtcgaactgatgatgtgttacggagcgatgtttagaacaacgcttgacgccagcattggatgcagcgaaacttacagtctgaggcttggtatacgcctttccgaagtccgaaaaggtccgagcgaatggagagtggttcacctcgactgttgcaagaggtttgagtaaggatcgagtgggatgacttcagacctggaaagactcacttggcggagatccgggtccaggtacataatactctgttagcaaagcatagcattgtctaccgatcagtattaccgaccgtccgattcgtattgctatagctcacccccacgagctgcttgttgctgctgttgtatcaagttggaagactgtctttgcgcagcaagaggtcgttgattatgggcaggagggggctgagcgtagcgctgctgggtttgtggttgttcataaggattatgttgcctgctgttctgcccgtagggctgcggcaccgtatcgtttgactgcgccgagggtcctccttggacgggggaagattgcccctttgcagcgtcctggccgtacgggtcatacggatcggccgcaggatatgttccggtagcgggttgttgttgatcttgaccatacggtccctgttgatggttggaagcttgttcacgagcctggccatcgttactgtagtcgttccagcccggttgagccgggtgcgtcggcgtagacgcccatggcgagggttgaaagggggagtaaggttggtttgaagatcccgaagatccaccggcagagtacatcttgaatagagcaagaaattaggtgctgtacagtaaagatacgagtcaggttatcgaatggaatgacctggtcgatctctggctctgagattgctgatgacggacgacccgctgattgaggtgatgacctacctgcacaggcgaagacaacccccggtcagcggcgcggggaatctccctcggttatgcgttttcgctatcgaatgccgtaatcggagagcgaaatatgcgctttcgatcatttcaccgagcgagatttctgcaacatgagcatcacccttgagaagctgttcaacaaaagcgttgtgaagcacgcaacttgacctttggtccgcatttcagaaacgatcaacaaaaggcctaagtcgatcacaactatgcccagcgtagccgccactggaaagaacatctggattgcatcgagcgatggggacctggaccgggtcaaggtgcgcctcgcggtcgaactcgaaagacgttcgcccctactaacggctatatccgccctcttctaccaacattactgctcacgataggagttgatcgaagtgcaaggtggatttctacactaatcgtagtgaatgaaggactagctgacggtttgtgtatcgtatgtttgataggattgacgccgaacgacaaggatgaaaacacctataccccgatgtaagccacttcttctcgtcgagtacccctgcctaaaagttgacatgatgaattctcaatcaggcatgctgctgcatcatacgggcacctcgagttgctagaatatctcatcagtaaaggcggagacatcaacataaccgacgaagacggcgagacccctatattcaccgtggaaagcgtcgaagtggcacgatggctggtagatcatggggccaatgtggatgtacagaacaacgaaggacagtcggtatgtaggcgattctgcatagtgcacgttgaagccaaattgtcgttggctgacccggctttggactcgtctacagcctgccgaatacctatttgaggagcatccggagaccgccgtgtacctgcaatctctactgctgggcaccgagggcactgaagaccagcccagcattcgacttgtcgaagatggagattcttcaggtcgaccatcggaataccagacggagcaattgtctaaccaaatttccgacgacctcatggctcagacgaacgaaatcatggagcggcacgagaggaacggtacggatcccgaggccgagctacgagaaatcgttagccgggccgtgcttcaaggatggcaaggtgccttgagcggacgggctcaggagcaggaagaggaagtggacatgacacctcaggccgaggcggatcagccggacagcaagagggcgcgaacggattgagcagtaatacggcgctcagcttgtagcctcattgtatattacctaacccatcataatgcgctagcctatagaaacaccagatgacaataaggtccacttgatgtatcagaaaaacggattcttcccatccccgacatgacttcttccgcttcgctccttcccatcgcgcatcacctcgttgcgttagggtcctgcgtctcataatcgtgcatcgctcatttcacggactgggtcgtccggcatccattcgtatgcgcacatctatattactgtatacagtgtatcatgacggcagatcggttgctctgtcgtcagggttctccccatgttcagggtcttggtttgttcgccatattaacccacaaatcggaacgtctccctagcaatgtgatactggaggcaaaacacacgtgattcgtcagtccgtcatcaccactccaaacccccaaacattgctcactccaggctgtagacttgccgatcccgttccttcctcatcagcgaccagctcgaagacttccacaaacgtcctcggcagccctttgatgattgtctcgtccatcatctctttccccctgttctttcccgaacctccggcgtccggcaacatggccgaagtcaccgagtttggaatgacatactcgagctcggtgccagcaggcgaggcggtaggaagtggttcggtggtgtgttgaggtagtgatcgggcggagatggcctgtgatgtcaatttcgacgggttgatatgccgtacgataccggtcactgtcacgagcagtcgtggtggagaagtccctgcatcagaaatgaagggagatttgcgtcgttagtctcgccgtttaaagagctaccttttatgacggagagatagtatggaaaagaggcttacctgccatgggcgtgctgtccacggcaacgatatcatgtttactaggcggaacccgagccagggcttctcctatctcgacgatcccctgtgcccgattaccgttccatatcagggtcgatcgttcccggtagaatggtgccaagagctgcgatacaggtatgccgcgattgagccaagaagagcttgtcgattcgagactccctggtgcactgtcgggactcaccggcagtcgatcggcaggcttgtcgtaactctcgtagaatgctctcgaaaagtttatggctgcgatggaggctacctcgatgtccttttcggtccagctgagtgggagatggactgaatttgtcagacaaatcgcaagtgcgtttcatgcgcagtcccgagacgaccatgacctacttgtgagtaagactcgagctcgatgcaggatcagagacgaagaatgccgacgacatgtcgagcgggagaggaatgttacttctgcaagtgcgtgctggtcgtgtagcaccttacctgtatacgggcagtctatcgatactactgcaccctgtaattctgtaaatgaaccgaggccgagtcctcggcgaacctctctgccccctcgccgctgagggttcatgatatcacgtgatttgtcatcacatcaccccacccacgctgctgcaagagccagcttcggtgccccgcccgagcatattggccaaggaatagcaggctatggaatgtcaatgcagcaagtgggcacaaacgaccgcagacgtcagaagcttctcgacaagaaagattcctattcccacgactgacgaaaaggaaagtacggtccaaggctcgcccctttgattccgcccctctcccccggtttactttttgtcaccaagggcaaaccatcggtaactgcccagcaatcaaagctgtcaatcgctcggcagacatcgcgggggtaagtaaaatctgatctcaacggctcaacgaaaaggaagggaaaagtgatccagcgtggacgggacactcggcatgttactgccaccggtggaccaggcgatcgaggcgtcgatcttgctggataccgagtcttcaaaagcgcaagtcagcgaagggagtaataacggctgggagtccaccttgccccgcaacaatatcgtagcttcaaagaggccctgcgatgtttgcaggaaacgcaaggtcagttccagaccgcgtcgactcggcgactttcatcttaatctaatcagttgctgcctgcggctacgccgaaaaaaaaaaacttcccgaacaactgcagatcaagtgcattcctttcaacctcgagccggacgcaacgcccaaggagggcgagcggtgtcgaggatgcgagaacttggacgttcgttgtagccatgactacgtcaacaagaaacccggtcgacccttgggcagcacaaaaaagctcaaggaggagaaggaacgaggatccacaaaggcgacatcctcacaggatcgaggtatcaaggacgaatcgggagggagtgagggcgatccttcggaaatggttgcagcgatcggagggcctggtttgacactaccagaatggcaccttcctggccaggacgtgttgcgttcggcagaggtaccagatgatccagcgctcacgcctgactttggacgagaaacgttccacgcatctccctttactcaaaacatcgacatccgtccttcgtattccgatggtcatcctacaccaagttcctttcccagcaagatctcaccagggatgtcccgagatgatgatgggcggtccagggcaccagcgttgatggatctatggccggccgggctcgacaagagcgctaccagcagcgtagtcgatgctcaaagcccttttcaagactttgctgggtccaggcaagggcgggatgccaggtacaatacgttcaacacgtatggcgatcactttgcgagaaatcgctcgaattttcccggcgacagctcttatacacacaacacggagaggggactgaaacgtaaagcttcccatggaccaggggacgatctcctcagtcctggacgctcggtatcaagctacactggaggccacaacaatgacgagaataattattctatggataaccgtcgacgtagcttttccaggcgaagcagcatgtccatcacacgcctcatacaacccgatcagcagcgcacaatcaacggcgacggcggcgctaatactacagcccacgactttacatcgggtacggccggaaacgatcaccgtcgaaacgattccggcagcgttgctcgatacggccatccaccacaccgtgactctttcacctcgcaccgatcggacgctgccatcgatcccaacctagagcctggcctcgacgcagagtcgctgtacatgaattttccgcactttcagttcacccatccgcctcagacacaatctccctcgttgcaaattgagctcgtcacgacctgggtcaacatcgaatttttcatcggactgtatctcaagcaccaacacgcgctcgtcccactcgttcataaaccgacattcagggcggatcttttggagaggcgagatcgggcagatcccgagttccgggccttgctgctgagtcttggtgagtagaaaggccgttgcctagtcctagtaagacgacactgacatgttgatcaacaaatcatattcctagttgcctatgtcatctgccaagtcccagtacatcgaatgaccggggactcgggttataccaagggcgacctcgagatgcttcagtcacaatgccactatgcctccaaggtcattcaagctgaagttcgcaaggcaagatgggagaaatctgaagagcctagtttgacgactttgactattctggtgatgtaagcctcggctggtattccaaaacgaaccgcatcatgagttggctgacaaaaccgtattgaatagcgactatttctatagccagaattgcaacgatctcactggcgcagcgacgacgttaggagaggcggctcggctagcctatttgaagaagctgcatcgcaaagagtggaagaacgatgacggatcctataatcttgttgaggacgagatcagaaagaggattttctggcagctatataataccgacaagtaggttcagccgttttgatgcaaccgcctcgctcgctgaccggggcgtgctgcccgatagaaccgatgcctgttcagacttgccagtcatgctgcatgacttcgaagggatcccgccataccccctttgcgtggacgacgataacatcaccccacatgggatgatacaacagctcgcaagcaagccctcatacatgaggggtttcgtggcgttggcgacgctcttccaagtccttggagaatgcctgctgttgtctcgtcaacacctcgctcgtcgtccggacaccgatgtacgcaccatggctgcgtggatcgaaaaatcacgcagagacatcgacgaggctctggaacggttgccagatgtactgcgccctagcgcttctcacgatccttccaaagattcaaacgaagtattcgccgttcagagagtcaacttgatgatcacggctgtttttgtcaagttcgagctggtaagatgggatcccgttgcttcctctttgctttacactctgctcacagccaccttgtgtataaacagttcaagttcaaagcggagctaggtacgcctattgagacggtggacgaggaacgcacagaggaaagtcgcaagatgtgcctccttttacatgcgtgagtcgggtcgtctgattcctccatgaccgggtttgatggcgtttccgctctttttcagcacctcgatcgaccatatcgctatgaatggagaagctatggtaaatgacatcacgctgagctcgtttaggtttgccccgcaactgacgtattatctcgcagcgaaacaagcttgtccggatcatgctggcgttgtcccacgagacagatttctggaacgagcaagtgaagcattggtgggacattgtaagtgattcatctccaccgactgacatcacagaaaggctgaaagattggtgatacgtagtacgcccacgtgcaatttgttcaggtcatcccggaatccaagcagaatgtatccgtatgagactgccaagagcattctatcagaaaacgaaacgacacgacacgacaacacgactttttggacgtccaccccatcgacctgacaccatctgaggacttataatagtaacgttcgcggccgaccggcccttcaattccgtaatcgttgtattagggacacgtgtgcctcgtctatttcgctatcgatacaatgaaccgtttctggcctcgttcatgctcgagtactcgagtctttcggcccgtacaggtctgctctatgctttctgatctcgaaccttggcccaaacggcatctgtccaatccatctcccgctgcacgactctgacagcctccttccgctcggctctcgctttggtcatgctagactgaatctcgatgccgtccagtttgagcaggtgctgaagcagaatttcggtgatcctggcatgtgcttgttggagcttttgccatgtaggtgccggtgtcgactgtccttcgctccccgcttccgacgatgagaggtaggcctggcaatctttctcgaagacgtccagctcgggcttcatctcttcgacaaactttcgcttcccggcaaggaattctacgagcccttcctcggtcgttgggatctcctccttcttcttcttgacctgttgctccctcaccgcacccatcacgcccgcagcgggtgggtcgtttgatccgacaagtacgatcatcgacccgttcttgagcccgtagccggccaagggcaacgacatgttcttcatgactccgccattgtagatcagcttgatcttgtccgctgacaagccggtttgcgatgagagagtcgcgacctgtacgagagagacgagcagaagctggattagctcgttggtcgacagctgaaagggaggatcgaactataccaaagtggacaagggggtctcggcgggcttaggcacagggatgttaaagctggatgtgatggacgcgctgaataatccagagtgacaggcgttttattggttgctggtcaaactcaccggtccttgttccactttacgatgaccttgatctcatccacctgctcagcttctttaggctgctcgcttcggcggaaaggattccagaacgacatgtttggtgatcgagttcaacgggaattgctgatagtgcgcgggacgatgttctgatagctgatgtgattcgatcggttcaaaggcgatcttgttcgaaacgtatgcagcagttagcaggttcactcagccatcagctctggctcagctttgagatgacgactttctcgccaagaggtcgaaacccgggtgggcgacgcgtaaaagggagacggcgcgatatgtcgatgcgatcatcatccgagtcgtttcagaccggccgcaaggattccgatgcagaggagccttccgctagtctcgaagggcgggtactctgaatgtcaatctgtgccagaaacagtgcgattgggtcaggttcgagccctcgtcggagcctctgcccttgggatcgggcacagctgagtgagcatgagagcaagccgataggtcatcggtttcagggcggattgcacggtttcaagctcttgacaggaggtatttgcgagcgcttgctgtgcatggtcgttgattcagattggtatcgtcacctttctcgtagtgccccgagtcgttcgtctgacatcctttctaaacaccggccgaaatcaggtccggcgtctgccgtgtcccaccaatgagactgtgactataggaatgtgaaattccgtcgctatgacgagagctgcggtaaggaggttcagagagctcagctattcatcaaacagtaccgcagagtttgcgctttgaaaatcataaaaatgtcttccacctcaccccctttcccctttgcgacttccttcgaggaaagatcaaacgcttagatgatttcgcgcagggagaagtacccacctttatgtgtcacggataaaactgcctcccgatgagggatgaacaggaggtcaggaagagcctcaaacgagacaagagaagttcacatttaatggcgagcttataaggcgaccacacccgttctcgattaacaagttctgctcgtaagtattattggtttatcgctagagacaaatcccacattcccaattccgacttcgaccctagacgccccattcctcgacaatgccacgatacgctatcgcactccttactatgagcttactcccttggaagatatccgccatcaaatatccgcgctgcgaaggcgcgtcgaccgatgtagagcaacgcgtggctctctcagaccgggtcatcgtagggaaaaaatttgaactccctttgaatgcgactgcagtaagtcatggaatcgggttgttctgacacgaatgtatctcaccgtcctgttataatcacttcaggaagatgtcattcccgatgtcaagacactcaccgattgcgtagacctgggccgaagtgagcacattttggctttgatccaataggacaattgtactgatgatgaagaacccagacaacaacaccttaccttgggatggtatggcttggagatacgaccaggacgacaagagctgttccatatatcgcaacgtcaccttaggtctcgacctcaacaacatgagtaagtcgtctgtataccttggcatcacctcgtcctacagttgtggtggtgcaatgggtttcgcttatatgggtgggtgacaggaatgcagggtattccagcaatctgactgagccgctgaccagatcgatcacatactcgcagcggcggacgctgaaggggcggacccgagactgaagtctgccctcaacgacatgcagtgttgcgaaatctggtatgaagggaaacgaagagactgagatcggtcgtagcccatcttactagtcaatcgattcgtgttggcacattcgaaggcttccaatcaccttcagtgcacgtagctgtgcatttcgatctatgtctttgtcacataacccacacagtattgtcatgttaggcctgcatgtcgcacagattccatccccccttccgccccgttggagaagccaaacacgggccggtgaccaaagttggaacagggccagggatatgtttcagattctagcagccccttaagcaggaaacataatgacaaagggcgccgagagatacaaaagtagcaattcaaggggctttagtaacaagcgcatgagctgcgctaacctagcgagcgatctgagtgattcgagtatataagctcgactgaaaactacttgctgtcatggtaagcatacctaagatacgccgggcctcgataacgattcaagatgatcacgcaagctttcgcagccgctctcattctgagtcagtatacgatgttctcacaagccgaaacgtgtgtatatggagccaagtacgcaggaccagctgggctggaattcaattacgacctaatggccgctacagaggtggacgcgagttggaatgaaggagctgtgagtctgaaatcatggtgctctcatcgctccttacctccaacttgccgctgaatgattgataccgcaacatcccagttctttggtcactccgaaggggtcgagagcttgagagcttgtatcgaactctgttatggtacgcagcaacgttcattccgaagctctgttgctaatgatgattgttacggtagagtatcgccagggctccgatcctgaaaagcagtgcatggcgttcggatatcagaaaagactcaagaactgcgacttttataaagaactgccttacaagtactacagtgctggctcatctgacgacaaaggtgagaagaccgcaggtcaatttggaacgacgtgcggggagtataactgggtcagagaacaagacgtcacaggtcagtaaaagtctcctgtgagcgaaatctgccatcttttcaactgaagccgctttgttgcagttggagctgtgcgctgctgtgaattgtcttttcccgatcctagagaaggctagatcggagacgccttctgccacacctagtttggtctcgcggcctagtacagttgacacagtgacgtagatagatcgaggtccagctttgtaaatctactggattgtagagatctttttgtgtgacctcggtcgcttcccatgagagggctggttaatcgaagcgcgtaaagatgacaaaatatgaaccttgtcggcctgattttggccaaccaagaggaaaaatttctcaacgatcatcccaggtaggtcacaagcgacaactaccagtacggctcacttcacgagttgtgatgcgacccctttatgatggtttgctgaatcaagttccgcggcaaggccatctaagtttgagcaagcaaggtgagcacgttctcaaaaaaaaagacatcactgtacagaagacccttcactgtcaaatggttgcccccaaccgatgaaccatgagacagcatctcctgtgtcgaatgacctcgatcgcgttcgtgcatcagtccctcccctcagttgctcagttggaagaattaccaaagacgccggtgctatttacgagcgtcatcgagggtgcctctcataaaggatcgcagtcgatgttgcaagtgattattgacatgccagatcgattttgaatcggctcgatcggcatcacgtgcgctggcgtgatcgtttttcacatgcgagacaaaggaagaaacagagaagctgagcgggtctctatgttatcaggcctgcggtctcctcccccatgatagcagactgtagactggagacatatataagtgttaccttcacaaagctggactgaagcttcttctatctcgatccttatcctttacctacctatacctccagaaatcaaacaattgccaccttttaccacgtccttcatccacgatgtcaacccgcagaccgtcttcagccgctcaaacggctcgaactacactccagcaagataccgcaacggtaagtccatgccggctcgtctcctgctttctgcatcgggcttattctcgttatcaatcgctgcgacagctgaacaatctaggcattgcctttcgggtaagcactcgatggatacccttgacgatatcgcactgagacgtggcatctaacgcgcatccaggcaatcgttaaccagctgaatcctggcgcctcaaaggcttttctttcatgcaacaaggtcgagacgggtcgtgtccaagaataccagccggttggcggcgcaccggagcctccctccggtttgcccaaagtgaattggatctcttcgtctatcggtgtcaatcatgatcttcgggggaaactgccggaaggtttcgaaccctatatacaatggtttggaatcttcttcggcaagaggatcttcgagtgcttcggtagagaagaacgccttgtgactctggatctggaggtgccgaattcggcggacgaggacgaaaagcacgagatcgtcaaggtctggacggacagtttcaagttttacctgacgtgggaacgcgtacccatggccaaacaaggagacgactcgaccatcaattcgagagatggtactttttctcctccacctaccaacgattccagtgcctttcaaagtcgggtcgacggaactaccggagccagcaatgctactggtacatacacgcaatgaggatcgatgtttcacgttcgaagacttacttgcgagcacatgtacacgaaatcggtagaactatagccacgccattttgaaagatgctacgtcccgtagaagtccgccggagaccttgtcatagcctgatgttactatatgtcctgttggcctttggctgtctccggtgtgccagggctagagatcttcacagtttcacccgatcaactcgctgcgcctcctttgaggcctttgaggtttgacaaaagggatggcgcgtcgatgtcggaagagattccggaggtaaaaaagagcgttaccgagagaggcgtggggatgagggggaatcgcaatgacgctagtccaacggtccaacgtgtgagacagcgctagaggtggctgggttgttgctggcaaggcggcgaaggcaggggaagtgacccaagcagcgcggggaaggtgaactacaggggccggggaagcagcgcgcgaccagacgaaggcgagggcggagaagggagaggaaggcgacttggaggcgatgcacgctcgtctttgcggtcgacctagactacctattctaggaaaatgggggtcgacctgcctgttcgtcgatatcgtcacgaagccccacaaggtcgactcgaaccatctacctactcttctacacctaattctacaagacactgccttgcaacgtagtttgccacacgatccatcgatcaatacacacacacacaaactacacaaacaaaacagaacccgtttcgacaacgcgttctctaaaccgaccaaaggacatctgatttgtaacaggcccaaaaccccgctcggactcacctcaccatgtattcgttccttctcactgccgctatccctctcttgctttccaccgcccaggccgttccggtcggtgacaacgtcgacctcgccgagcgtcagatcaaggtcctcgccggagctcccgttagtgacatcagcgtcaaggcggacaacctcgtccagtgtgcccagagtaccatctcgtggtccggagccgtcgtacgtcgatcgtcacgcaggctgtcaggccgataaaacctctcgctaaactctctgcacctgatgatatcggtcgatacggacaggctccttactcgttgtccatctccaccggtggattgtaccttccttccaagcagctcgagacccatggcggactgaacgatgccagctaccaatggaccgtcactcaacccgaaggtaccgggatgtacttccaggtcagttccgagcgaattgccttgaggctgtagagacaggaacgcgggactgataggagaggtctcgtcactttcctgtcaacccttttttaatccgcccgggcacggttcagatcaccgacggaaacggtgcggtcggctatgtccagaacatctttgtcggtggatcaggcgattcgagctgtctcgagggcgggtgcgtttctgcatttcgaagcttggcttcgttgtcggccgtcgactgaccatcccaacttgggcgatgcctttttctcctcacgcagatcctcatcatctagctcgagtgcggctcctcagagtagctctcaggctcagaggtttgtgcttgggtttcggcgattcaggcggttaggtcgtgttttctgatgcgatctggttttctctttccttgctttcaaattgcggacacaaacacggccgccgaacacgacatccgactcttggacctgtttacggatacgctcacgttctggacccctttcgactcgctactgttctgcccctcctcacatcctcgttccctatcctttttagcgaatccactgcccctgccccctcatctacctcggccgctgttcctgctgccatcacgacgacatcatcgtcatcatcatcttcggaatcggcgccgtcatcgacctcggctgccgcgcctttgacctctacctctgccgccgctgccgtcgtgcctgacgaatcgagcagtggctccacctcgtctgttccagcggctgaacctgcccccgtagcggcctcgtctacggctggtggtgctgcgggtggcaacgtcgtgacgatcacttcgacctcgaaggctgcggctgccgctcagcctaccacgtcgtcggccgctggtgccgctgccgacgatggtgtggtcacccagaccgtttccgcctctgccgtcgccgctcagtctagtagctctcaagctgccgctgtagctgcttcgagctctaccggttcgtctgccgtacccgtgacgaccttgaccgccggtgccgccggatcgacttctacgaaccgtgccgcacaggctcaagccagtagcggtagcggtacccagacgtctacggccgtggtgagcgggagcgtccagacgtctacgcctcctagcaacgccgccggacgatcggtcggtgctatcgggtccgtcatggctgtcgtcgtcggcgctgccgtcgtcgggttgagcgtcgtgatgatctagagcatcggcgaggtggccgaggcgacttgggcgggcgtgaagcagggtttcatcctctactaatactggaggaggggagttttgtcaatggacactacgatacactacacgttttttgtgactcgcccggtcgcgcccttttgttcgcctatactctacggacgactctacgtcctacgatactactatactctactaccttttctgcgcgcctgcatgttttatacgatatactcttcggcagagccgggattgacctttttgttcatcttttgtcactgtgcttgtttgggagtctcgagtaggcatggttgcgacgacgacgacgacgacgacgacgacgacgacgacgacgactggtaggtggatgaattaaggacaaggatatgcgactcgcgttggcacctaaagaggggggatggatgtgcatgtgtgatgtgatgtggttgtggtgttgatgtgaatgacatgacgcgactggcgcacagtcctaccgggaatttgtggattgattgatcccgtggtcgtccggagggcggcagggggcgggaggcttgcccccgatgctctactttccttcgcccccaccccctatcgataccccggcgccggacgactttaccttgcagtactggcccgagcaaaaggtcgtcaatgccgggttggtgctcggtctcgttaggatgctggtcggtggtcccggaggcggtaaccaggtcagcatcatgcgttatgccccacgccgctcgagcaaaagacgtgaagcccaagctgatccccataccgggacacgttcacagaccgccatggcttcaagcggggtgacgagatgtctgatcgaactcgccctgtcgtccaacgcgcctccggctctcaaagctcaagcactcaacacgctgacgcccatcatgctcacgtcgccaaacaatcagtcgttgttgtcgctcatctccctcgcacccctcgtggcggtgccggcgaacgaggaacacccgaacggcgggttcgtccggctaccgatgcgaccagcagtgctcgcgctcgtcggtagcgtggtcgaaggagccgacgtcgaggccagtatgggtcgagcgctcaagggtcgagcggccggtgtcaacatgttcgaggcgtacattaccggaaacgaggatgccagggaattcgtgctcaatagcatggacccgtctttgcccgtcgctggagtctcggatccgtcgagaccctatgaccctcctgttcagacggctggaaataccatcctgaacgccatcgtcgagacgcctctgccaggacgcccggtcgaaccttaccgtatcctctttgcatgtctgctcatggctcacctcatacggaattcggaaaaggcaaagtctctggccagggagatcaaggtcccacccgccggtaccgtcggtatgggcggagagcccgtcgacgagcacgagcatgcgattgcggacgacgacgatgatgacgagcacgagactctgctccaggtcgtcgtgggcaacttgatgctcgcacagcgggaacaggcggactgcgctaatcgggccgccaaggaagggacgggacctggaggcgtacccggccgacatcttgggaccggcgtcgcaggcgggatcagcgaagaggagtcggattggaaccgggtcatggtggggtacttggtactgctatgcacatggttgtgggagagtccaaagaccgtcagggcgttcctggacgagagcgatctgcaggtggtcagtacagcgtgaatgaggagatcgtttcgggaccggggcgctcacgtgtcgcgttcaaacagctcatagcgcccatcacccaacccaacggcgtggacccgctcgtacagggactatgcgcgttccttctgggcgtctgctacgaattcaacagggagccaggcgaggtcactcggtgagttccgatagcaaagtgaacaacaaggcaaagcgtactgatggactacgttgaaagggcgacgcttcatcccatcctccactcccgtatcggtcccgatcaattcgtctcgcgcatggctcgtctccgcgaagatgctcgtttcaaggctgtccagcccgatcagttcgaggacgaggacaaggacggcttgaacccgatggtaccaacaggagctcctcctgcgactcctggcctggaagaaatggaggacaccgaagcagaggtctggttcgattgggcgtttgtcgacttttggaagaacaactactgtgggtcgcctcgtagttggagagtgtgcgcatttcagagccagctgacacagggtgtttgcttcgcaaagacaccatccaacgagctattgcggtcgaacccgatgccatgcgaggctcgctcggtgagtatcggtctcggttctgtttctatttgcgaatgctcagctgacctgatgatcccttcctaagccgatgattccgaagctgcaggcgtgatcgcttctttgcgggagaagattgcagcacagacagctcagatcgatgtcttgcgacaaaaactcgctactcaggcgaaggaacacgaagtcgacgtaggtcatgccatctgtcaatctttccattgggtgccagagcttacaattcctttatcatagcgtgctgcattgacagccgatattgaggggctctccgctcaagtaacttctctcacggaagaggtcgacaaactcagagccgaggccgagaactcgtcgaaaactttggatgaggttcgcggatctgcagatgccgctcaccagcaacagttggaagcggtacgagcagaactcgttacggccaaggaagagctcgagaccgctcgtagccagtcgagcgggtctcaagatcgacatgatgccgaaaagcaagagattcgcgacagcttggctgccaaggatgccgaggtcgatagcctgaagaaggagctggatcgcgcaaacaccgagctcgcggacaaggcaaaatcaacagaagacgcctccaaggcggaagagattaggctaagcggcgagttggaagaggcccgtcaatctgtcatcgctctccagaatgagcttgacagtttgaaagcgtctgccgcgtccgcgaccgagtctgcgaagaaaggcgatgaagagttgcaatccctccgggaaaaggtcgaggtgctgcaagggcaagtcgatgcggcggaagaaaaggcgaagacgctggaagccgttacttccgagcgagatgatctgcggaagaaagtcgaaaaggctgagaaagacttggaaaccgctaatgcggcggctgccaactccggtggggctaagggcaagaaggggaaatcgaatgacaatgacaagctgcaaaaagagttggaagtcttgaagaaggaggtcgctgaagagaagagcaagcgggaagagaccgaaaaagaacacgaggatctgctcgtcctgttggaggaactcagcacaaaacgtaagaaggacaaggctaggatgcgcgagaagggcctcgacgtctcagaagacgaagacgagggggaagatgatgacgatgatgcggacgagtaattggaatgacatgttcagggattccgggttgttttctatttagatgtagctataatttgagcctatggatacatacatgtacgactccattcggcttaacaatctgatctcaagatcgagttggaatcgaagagagcgctttaaacgattgcggcctcttgaaatcatcgagaattccccgtcgagaacatgcaagacagcagcgggctttgcttgtggacttcgtctacatggattttctgatcatgtctaagaacggattcacgagtttgagcaagagatctgcaaagacgaaggtaacaaacaagatgatagcaaagacggagacaaagaaagtgatccagaaaaggagtagtaagatatttaaaatcatgttgaaggttgaaaattgatggtgttttttcttgttgttgttgtcggtgttggtggagtggttgttgcggtggtggtggtggtataacaattgggacttgtaatggcgactggttgttgagcgatcagcgatggtgtggaactcgctgaagagtagactgatacaagacagacaacatcagacccacggcctgtacacagaagcccctgtctcgctctcctggtcggtacgctcctcgagcatcaaagccgccccatagatgcacccgagtcccaccagactgcagatccaaaaccctgcaagtaatccaagctgttcttcccggaattttgccctggataggtgtccccgcgcctcgtttttgggctttgcaggaaggtgcgcaagtcggttgacagggaacgcaggtaacgtggagagaagtgtctcccttgtaggaccgcgattgctgcggacagacctggctttggacagagcttgtagctgccgaccgaaaaaatgctgagcgaatggcatgctgagggagtgcgaaagatacaggattgactgatataggatgttcccgatcgaatggaggcgccatccagcaactaactgtacaagaaaagcttcctcgtctcattatatgctggagcgtgacaagcgctcctttcatccctcctcctgctgacgagattgacgatagagcctttggctaaggatacttcgtgatctgctacatggaccggatagtataacaaaatcgagacttgcgtttgtgcgagcggaacgttcagatgaaacgagcattgaaagctgttcctttttgcctcttaataatgaggtcgctcgaagcgcaaaactcgcttcgcgcgcttgaaatcccgtgtctcgagggggaacacatagttgcaacctgagttgattgaccggattcgagggaggaaccgtggtatgcgacaacgcatagaaccgatatcgacaggctctctaccaaaagctagatctctcctgcacattcagatactcaatcagccgaccattgaaaaagaacgaaatgccaccaagatcacgaggtagatcagcttccagaagaaacagtcagaaccactactcatcaatttgacgtccttcatcattcaccagcatctctcaagccagactcgcaggcgaacggcaagaagagatcggctccctctcctgaacctgccgctcctgcgaaacgagccaaacccgcatcaactaggtcaaagcccgcgtcctccacagctcccgcttctcgccaatctgtgcgaggcaaggcttcagaagatgctccagaatcttcgaatgcggctggcggctcgaaaaaggctgcatcgcccgtcaagcctaagaataagaccctagctggtatcaaggaggaagccaaggccgggtcgagcaggaggagctcaaccggctcaaggagggttgcagctcccaacttgggaagattggctttgcccaagcctgccggtaagtcgtccaggattcgctcgttatgatcaaggttctcaagtttcgtactcgatggctactgtatagaacacctccgacccgctcagacggcgatggttttcggtaccggggactctggagagtttggaatgggcgatgacgaaagaggagagaagagcaagcccgagttgcaaacctggtcggtcgtactcgtctagagattctctgctcccgcaactgattgactccgctgcatcggatgtaggattgaagaggcgatcaaagctggcaagcttggaggagagggagctggaattgaagacctcgtctgtggaggtatgcactcgctcatgatcgatgagcaaggacacgtaagttcggtagccgattcgtcgattcgtgatgggaacccgactgacatgcggcgttgtgcaggtttggacatggggagtcaacgacggaggagctctcggtcgacggaccgataaagtgcccgacccagcggacccttctcagacgctcgaccgagatgtcttggaggctacccctggagtcgtacaggctcttgtggacgaaggattcagggcggtcagggtggctgcaggagatagtgtcagcatggccatcagcgacgagggcaaggtcaagtactggggtagtttcagggtgagtacatagtttacactgcgatcccgttggttgagagctgactcagttgagtcggcgctacagggcaaggagggtctgatgggattcggaggagtcgacaagatgatccagtacgacccggtcgacttgccatggcagacgagtcgatcagaaagcgatcggttcatcgcgatcgctgccgggaccgaccacgtgctggccctctcagccgacggttacgtctttgctttgggagacggagaaaaggctcagctcggaaggaaaatcatggccaggaggaggttgaactcgttgcacccggaacgactctctctaagaaatattgtctcgattggagccggagcgttccattcgtttgcgatcaacgaggacggccaggtttacggatggggaaacaacctgttcggtcaactcggagtcgctgatgaggatatccacgcttcgtgggaaaagggcgtcgtcgagaagcctacgatcgtcaaggccctgagtccggaaaaccatggaggggccaaggtcaagctgatctctgcgggagaaaaccactcgttgttcttgttcgacaatggagccttgttcagctgcggaaagattgtgaataacgagcttggaatcggagcggatcaccctgccatgaccgaggaagccaaggaagatcagttcatcggggagcctgtgcaggtgaggaccgatttgaaacgtccagcggggaatcttttttgatcatagatttgtctgtttgacgcaggtcttcttccctcctccttcgaccccggacaacaaggttcccaaagttcaacctttcgaagactcggatgcctaccgatcggcgtctcatcgggtcgctcacgtcgatgctggacctcgtcatagcattgccgtcacgaccgatggcttctactattcttggggatcaggtcgtgagtcgcttcgtctctttgatgccttgccgcgcaatctgacgatgcctcttgttgtccagcttcggcacagttgggtctcggtagcaaggagctcgctgaagtacctactttgctgacgaacaaggtcagtgccgctgccatgtgtagctcgtggccgtctcgtattgaaagatccttgtcctttgcagctgcttcgaacccacaccggtgtcaaggccgctacgggcgcgatgacctctttcatcatcgcccgagctagggaagaagaatggggcgcgtaaactgtcgaggttctgtcgcaacgagccgcatccccaaggaggacgagtcatgtatttaaaaagcggctgtgaccgcgtgtagcgtctgtccatctcttccatttcctttttcgctcgacgtggacaaagatatccgattatatagatataggtgcgatgtgaagcgtcggacgaaccagtatcgcgtgtcttcggccgcgatagagattggtcgaggagccatctaaactttttatggtttttcctcttgtacgaatgtcggcaagcgtcgtcgcgaacccgatgacgagcgcttctgagtgagggcttattcgtcggggagggtcgacctcgggaccagggccagtcgtacaagatcgcctatgaaggaatggtacatgcccatcctcctcaatgagtctctgaccgactgataggtatacatatcgaattcaccatctcttcctcgctctctcggtcgcatgccgagtgattaccagagtaacaaatgcggattgcgctttacggacttatccgtctctgaacaacaagatgacgaattgtcgtttcaaatcagaagcaggagagtcggcaagttatcgataagcaggacagcagggtccagatcggccaggccagaacgagggaggtagcatcgacgtcaacgaaacgggtacaagggattcgtagtagtagcgatcctccacgatgagtgtcgaatggcgctctgtttcggaagtgatcccccgagatctgtatgccatcatggtttgagacaataatgaaagcactttgttaccaagatgaccactgatttactgatgttttggttgaacccggagggcatcatcacgacaagcgcgacaagcgatatctgtgcgaggaattcatcgatcattccgacggaacacgacggaacgttctcgtcgacgcgagcaacatgcaacatgagacgacggttctctcccggccttgaaacgtccgaagaaacgtccatgccgcggccggaaatgaaaagcgacccgcagtcgaacctcctctctgatagcgctgtggtgtgtgacgtgacatttgacatgacatgacgacgggcaggtgacgtgatgaaaggcgcgggggttgcgaagggccagaatgcgcgtcatggacctgcgagatattcgtcatcatcacgagaccgagcgtttaagcggggcagcggcagggcagaacgggcgggagtgccacgagcctgacgtcacagaggtcgctccttgccgttgccctggtcaacgaacgagacaacgtttctcatcatcatcatcatcatcatcatcgcaccatcgcatcatcgtcaggtgcaggtgccagctcatcccacaacgaccaactctttgaacctatataaacttcaactcgtcaagttcaaaactacctccatcacatcgaactcttcaccttgctcctctcaagaaacaaaccatctctttcatcaaccactctaccatcatgtcttacgataacaacaacaccaacaacctcaacaccggtgtcggtgccactggccagcaaaaggcctttgacccttccaactcctttagcagcggtggtatgaacaagtgagtcctctaccgatcggccttgtcctaccctgtccatggcaccgtgcttacccagcctcgcctcaccttcccgcagctctaccggccgagagcctttcgaggaccctcgatccgactttgccgcccccggcgcccccgcccacgccgtcgctggcaacttgcactacggtcaggccaccagcgtcactggtcaacagaacaccggtgtttcgtccggcttgggccactctggcgccggtctcggtcactccgagtctggtctcggacactcgagctcgggcttgggtcacaccggtaccggtacccactctggcgccggtctcggtcactccgagtctggtctcggacactcgagctcgggcttgggtcacaccggtaccggtacccactctggcgccggtctcggtcactccgagtctggtctcggacactcgagctcgggcttgggtcacaccggtaccggtacccactctggcgccggtctcggtcactccgagtctggtctcggacactcgagctcgggcttgggtcacaccggtaccggtacccactctggcgccggtctcggtcactccgagtctggtctcggacactcgagctcgggcttgggtaacaccggtaccggtctcggtcactcgaacactgggtacgatgagaacgactcgcgacgaaacgccggggaccaccctttggtacacgacacccgtcaccacggagacatccgatcgggtaccgctgatgaccacctcgttggtcagggccgacacaccggttcgggtatcgatggaggccacttggctggtaaccagactggagacgctcccggcggtatcgtgagtcgcctctggtgttctgactaccaccccagagtccgtcgctgatcatcttgcgtgatcttgtcccctaccccacagcaaaccggcactggctcgttcggcaccggccgagacgtctctcaggacgaccgaaagatgaccgacaagatcaaggatgccgttactggtaacaaggagcacgacagccaccaccacgagactgtcggcaagggtgcgcacactggtaccggtttgaccggaggccaccccggcgctggtgtcactggagcctcggactctaccgtctacggttccaacaccgccgcccgtgactttgaccagaggaccggatccgtcggcaaccagggcgtctcccagttccagggtagcgactctcacggtcccatctcgggtggagccgccggtaccgacaggttcgacgctccccgacgtgacactgaccacaacatcacccacactgacaagatcaccggtaccggtgccgaccacggtcactctgtcggtaacaagggatccgacgaccacaagttgtccggcttgacccgacacggtgacgactttaccaagggtgacactgccgactcggcctacaagaactacgacgccaccggtctttccggccgagagaccaccaccacgggagtccacgacaacaacttggagggcaccggtgctcacaaggagggtctgatggacaaggtcaagcacgtctttggtggacacaccaacaccacccacgccgaccacaagtagagggatcgtggcgcgagcgcaggtcaactaggcctgccgtccgtttcaactcgtcctttcgaatagtgtagccgtgaccgtttctctccctttaatcaacggaaatatttgtcgaactcgttgccaagtcaaaatcgctgtatcaaacatgagataccaatagtcgtttcctgcccccccaatgttttgcgtgacgttttttcgacctgcttgttggtcgtcatcgatggtcagacaggggttcgtgaatcactccagatgatgcatcattggcagaagagcaccctgagaggatggtcgtatgtttccccgtcgtttttgatgcggatgagatcacccttgacgtcattgttgattgtgggagtgcaagtggttgcaccgcggatatactcggtgcgtgtgtctgtgtcgattagggaaatgacgttcggtcaccagcgagcaaccaccaaagccagacgaccgacaccaccaaagactccctctctctcacacacatacactcaactcacaacacccccaagtcatcctatccatgcaagttctagtctgaccagtccaaccccggtccctagatctgacatcgtacgtccacgatcccgcgcgacccgcacacacgtagattccccggctcacgcgcccacgctttcaccctgaccccccggacatatccccctcccctttgatcgatcatataccgcgcaccacacagctcacaagacctacccacccgtctgctctcaacaccgctaccccgcacttcaaaagagaaccgggaccccccaatcaagagatcgatcggaaataaaaagagtcgaaagagaagtgagaattcaaacatgtcggtcgaagtcactcctagggattacctcgggttccgccgtaagcctgttcagtccagtcgggatgaccgaaacccccccaaacccccaaactcacgacctctgtctgatccctctccggatgtctctctctctctgtctctgtctctctctctctgtctctcttgcacaggcccgttcaacaacccggtcacctcccacctcaagctccggaaccctcatcataaacccatcgtcgtcaagatcaaggtcacctccccgaaagcgtactgcgtcagacccaattcgagcaggatcgaaccgggagaaagtttggagattgccggtgagcatggacggaagagacggcggggtcccttttttcgagattgttagattgctcttgatcgcttaacacaatcgtcttcctcttcgtcgtcctcttcctcatcgccattatgtacatccctcggactcgcaccggatagtcatcctgcaacccatgaaggaacaacctcctccccatgccaaatgcaaggacaagtttctcgtctgcagtgccgagatcccggtcgaaaaggagagcatggctttgaccgactatgtgagttggtctgggtctcctttgagcgaatccgcgctcgacgtgcggaaaaaggcaattgacgtgctcatccccatctgacacgatgcatctagtggtacgagctggaaaagaccaacaagtccaagatccaggaacacaagttgcgggtcgcctacctttccgataccgagacgatcccggaggatagcgtcggggatgtcagtcggtataccaccgaggatgcgcaggtgagtcgaccgtgcgatgggttggcggtggacgacaggtcaggtcgtgtgatgctaactgaatgaacggggttcggaccagaacggcggattcgcttcgccttcgacctcgaggatgatgtcgaccgatgcgtccaccccgaccggaacacccaaatcgaacggcggcaacgtccacgcttccttgccctaccccgccacccctattcacgtcaccaacgtccagacccagaacactgcccccgccgtgcctacctcgtcggttccctcgtcgggcccagcgtccgcctttgaccctgcccaggtcgccaaatccatggctggaccgggagccctatcgaccccctcgaaatcgagcaactcggtacccagagccgagatcaactcgttggccacccacggcggagcgtcgtctgccactcccgcccagggtggggccgcttcctcgctcgtccagacggccgaggagcaactcgcccacgcccgagcgcaaatctctcaactccagactcaacttgccagctcggacctcggtcaacgcgtcaagggtgccgtcggcgaggtccaggcaaaggccgctcaggtcgtcccgtcccaggtcgccgaaagcgtcgagggttaccaattgaccgtcgtgctcgccgtcgccgtcgccgccttttcgatcgggtacttgtggcacagctgggcttgatctcgatagacgccggggcaagggtgggggatttctcaaagccgttgcctagacgctctcgtaccacccccgttactcgtttgcgtttgccacccttcctctacccgccattcgtgctctgatgggctcgatttcagctcttggtgtgtgtgtttttcctttcgatttgtaagcgcgtcaagcggggttacctatatacatacagtggttcacatatggacgatctcccgtgggtccaatcatagccacgggtccgccttgtttataaacggcccgtgcgagtctgcctggcatgatccactattgctccctttacgtcgggattcctgctctgcagctgcgagaggtctctatcggtcgacaagggacgagatccgagatttgaccccggcagcttaccaactacctacaagtcgcgtagattcgagagctccgtacgacattcttgtgaacaagctcattttgaaattgccaagcgcgttaagcgctctgatcagtaccaggctacgattacatatggctgtcctcgatcgcatgagcagagtcagcaaggttatgccgcatgcaataccccttgaccgtcagtacgttgatcgagcctggatctctagtcgagaaggtccggtaggttatggcgcaacgtgtttgctaagatactgaagattggaccagaccgagaagacgacttgggctaaagttcgagtctaagggctcaagtaagttgcgggggttctaaaaaagggagaggcgaccgacttgatcgagctgctgatgagggaggagaagtcgacaaatgggaagatgacggacgggacgaatgaaagcccgacggcaagaatcggtgacatacttggtagtgttgatatgcgctgtgaagccgaggtccatccgactaccacatgtaccctgtttcacaattcgcaatgtgcaagcggactcgttgtgccttcaacaagagcatcagagcggacttggtgccgacatgatgaccctcactggaaatatgagtctgcattgacaagcgccggaagccaaacccagtcgaacatagtccgaagcctcgaaaagcctttcaaacggtagccatctaagacagaatggagcccgggcaatgtaacaatggctcacaattggcttgtgctatccgccctacaaacctcgcgcctaggcaaaggtcgaatctgcaatgaagtgtattccgcgcgcttgtgctacatgtggtcacgtcgactggctatattccaacacaacgatatgtcgctataagattactgctacatctagaggaccgctttcgatcggaccttgcctctgttcagcttctcacagacaggacaattcttgacgcgaacccgaatcgtggcactgtatgccagcttggcgcccaggttctttgccgtagctcggcctggaccaacattccgacttcgctcgtcggacgtgtagagaaagttggccagcggatctggtcgttctggtagctcgatcgtcttgtcggggagagcacaggacgcgtgaaccaaatgtcgacaaaggtaagcgagagctaggggcgccttttccgaatccctaggcttgaataggtagtcatcacaaactagacagcgggtattgcctgaaaacgaatacaggtcaatcgccggtcaacgacggctcggggtagtccacagctcaatgacatacctgtagcgaatgcaccgttggtctgactgcgctgcaattggcttgcaaaagagctggtatcgccagacaagatcttttgacacccttgcaaaagtgaaagttggagattcgaagcttgcaggatcttgatcagcgcatctttgaggccgggaacctcaagaccatctttaatgcgacggatgatgcgcaatgggtcaatgtcggccccagcgttctcaagaaggcctctcatgaaggctagggggataatgtcagcccgactcaacaaattgccacgtcgtagatactactcaccgggcttgctttccgaatacctcagcaggtcctcccacaaatcgtcgtccgcttgctcccgcgcgaaatcaatggcctgccgatcggagatgacgtttagcgagagcaggtggggaacgcgtccaggtcgtagctcaccctttgtacgtcccctagcctctcgataatcagcatcagagcctgtttgttgtttcccattctgcccaacaggaacaccatttctgggacgaaatcgcggccggtacagacttcataggccttttctaagctgtagtagttgctggctcgtagatagcccataagctgcgagtaatcgtattctgcgtaaagccgcacctgtagccgttttgacgtgatcagattcgcagttcagaagaggtttgcagcacacaacttgcctgcagatcgctgtattcatatgctaaagacgggtccttgcggaacaaaccatccaagtacatgtggaggtatttaggtctttcttccagttgagttacaactcgaccgatctaagagaacaggatagttcagtgggcgctcgaccgtctctgctcctctcggtcatgacctacgggtatagaataagtatgctcaaccaggagcgcgatagcctgtccatgtcgagcggtcgtatgtccctctgttggcgcaagtgccatctcctccttttcatggtcgctatcgacaatcgggtggtccccgttgtagacgatattctcccggtcaaagtccacaagcaaaaggacttgatcctgtacggcggaaaagaggttgtgggagctgatgaattcgaacacctctggtttgcggaggcgtatgaggaatggcaaggccttggctggctgagactgtgcaatgtacctgaatagagggagtgtaagtcatgaaaaagaaccgtacatcaacactcccggctcacagctcggccacacattccatcagaattggagacccggggttagaatccagttctccttgaacagcgatgataaccgcctgtatgtcgtaaatttcgatcggccaactttttatgcgtgttaagagaccctgtcatcgctgtcttagataagccactgcaaagaggaacgccggtcggtagagagactcgcctccttgtcatgtgtcaagaagtgggccatgatcatatcgtatataagacgcgccaagcgaggcgatctgatgggaacgtaaggaatgatggtctgaccagacgatgtcagtgcccggctacctgccatctcggtcttgcctttttaacttactgggaattgacctcgttgtatgaagagaaaaatccaatcttcccaaattttcccgtcctgcccaaatactttcggacagagttgagctgcctgatcatatgagcctactccgagggaaagcgggagtttcatgagcggtcttctttctagcagcagcagcccatgcgacccaccttcatcaaataggtgcttaatatatttgacgccgatcgccttcacgtcaagagtctcgccatgctgctcgacgagtttctctgcggcagtcagtgcctcttcgaagcgacgttgatcgacaagccagttgatgtgatcgacttggtcccgcggcctcgagataacgagatcctttggactgacgacgagatatacttcatctcgcgcacggccagagggcatcaagaggtaatcgttacagccgtataggtggtagttgctcaagctcaacgcgtccgaggagatttcttcgccctttctcgagatgatacgcaattccggtcgatttgcggctttccgtcgctgttccatcgggttctccgttgcctcgttaccgaatgtatctggagcgacgtatgctagtaccaggaacgcgttgtcactcttgtacgggcagataccggagatcatacagtcaacccggaagatggcagtgatctcgacggtaagagtgacccctccggtcactgatgcaggtcgaggccgctctcgtatccgagcgatcttgatgtagtctgcccaagctactaacagggtcttgtcgtcttcccagtacagcgttggcttgaagacgtcggcccgcgggctatttgccggtcgatctatatacgctatccgttgacttgatgaagtatcgtagattttgattccctggggaagggcgacacaactgtaagacccagtccatgccgcctgtaacaggatcggcctccacttaccttatcattcgcccatgctattagattccccctccattcgatagcccatatgggaccctctccggagtgtaacacggtctccttgtgacccaaccagcccttttcatacatgacgagcgttcctcccatacccccgcagacgaaggccttggtcgatctcctggcaaagttgggctcaagagcgacggctctcaacggtctcttttggtcgaaagcgtagatctctggagaagtcgatgaccgaatgacgacccgacctaatacacgaccagaggacaaaagtaagcaggaaatcagggcgaatcagctagctctgcagctgaccttccatagacgctgtggcaatgaaatcgctctcctcgtcgatctttatatccgtaattgacgctccgtgtggccgatacgagtttatcttactcccttcgtacgttaagatatgtaccataccgttgtgcgtgccaagagcctatatcgtgccattgctcagtacacgatggaccctcgtcccaaatgacaactgcttacaatgtagcgagacgatgcggccaaggcagaggctgtatccttgataaggatctcggaggacgccggtcccaatcgagaatactttaaggatctgccggttagagcgaagcatatcaggtggtgctttacgggcgggtacagcgaaataaccagcgactcacggctcttcctcttcatcgtcatcttcgtcctcttcctcgtcctcgtcctcgtcctcatcttcttcatcttcatcttcctgtccagggtccacctcaggcccatcctggtcctcttcgctgtcggcctccgacgaagccgtgtcctcgttactatctgtatggacatcgacaggtcgggtggaacctggaacctgcgatacaagctgatcttcctgttggtcgtattccaacgtatttggactcgcatctaactgtctctcagccgcagatccatcttgacgaggctgtgatgagcctgactcctctactggcatcatggctgcggtatcttcctcctcgtctcccgactcgctgtccgtctcgtagtcgtcggattcgtcggcgatgacctcatcgtaaggcgcctgagtttccctcggtgacttgctagaatctccattctcgccagagtttccggtagtaacgtcaagtgtcatgccggtcgttgccgaactatcctcctggccctcgaccgatcccttggctgacgactgtttcttggtgctcatctataacatcttggtcgtgcgattgcctatcaaacagcggtctctgggcctaacagagcatggtgatcaggacaaaaaatgcttcgttacaggctgagaatctagcagtcctgtaacctagcaacagctagctgcatgcaggtgagcgtgatcacatatgacgatctcggtcgaggcggatgcaaatattcgttcccattcaccaagccatcgaggccggggggcgagctgcccagttggcatctgtcgtctcttacccgaaaatggcgagctatttgaggagcggtacctcatgtcaatagtatactgcacctgggatcagaaggtatgatttgttgatgaccgatagcagagaattgtatcccatgaaacatccagaggcaccgagaactttctgcgtctgaaacaggcgacaacgttctcaactcgacaaagacgatctgacgaggctgtttcactccgcctcccagaactgcattttgaaacgacagcagtgatgagaagtgaattgatggcgacgtgccgtcagttctcacagcaggtcccgatcgccatcgaaccactctgtttaccggggcgcggtgagacgggtcgacaggtcagctgctataacgtttcccacaatgctcgatagatttcatttgcggtcatcgagttcttatcctccggataaataggattgtaatgatcagtcggctagattagaaatgttcccgccaccgaataaaaaacgaaaacaaacaggtcacacggtcgatcgccaggtcacggcccggtctgttcaaaattatgtcagcattctgatgtcttggcacgatcgtgcctctatctgggggaaggctgacaaaagaaagaatactggagaatcattgacgagttgttcgatgtagaagaaggatcgagctgagagaatcggagcatgcgaatctgaggcaaagttcagatgatgcggtcggtgttgccggtcttattgtaactatgattacgattataagcaaagcctaacatccaattcttactcgtctatcggctaggatgcgcgcctctcaatacggacttgttcatatttgatcgcgcgagggcggggttcgactccccggtaggaaattctttttgtgctctggaatgagtattcgcttctcatcctcttttttaaggttcacccaatggtgtcacttcgtactagcccagcctctgtactacctctttattcagaaagccaacactcaatccgtgccctgctaggctgctttaaccgctctagcatctagtcaactctgaacgaattccgaaaccgaccactcatcgatgttcccgctcgaatacctccgtgtatcacgtgacctcggccgaagtcgccgggcagtagtttagcaagtagccggcgattcaatcaatgtgaccccgcccgcacgaaggcataatcgaccctcgatgcgatgcccttcaatcagaattcttgatgtgacatacgcgatctggtcctcaacaccatatcgaagcctgagcatacgaaatactccatcgaacgcaagctcactggtcaacgacatatcttacccaacatgtccggtctccagcaattcttagcagagtatgttatcgatcgccgccgcagcgttcaatgttgatccttaccttcaaccattcgtgtcagccccctataccatgacttgttctccatactcaagggcgctaggaatggcttcgtctatggctgcaagatccgtaagcacaagacatgcgagaggggcgggcatccgcataggatgagctgacgaaaccttcctttccgcaggtttcccccacgcactggtcatgaccctcttgttctcaaaccgaccttggccagagaagcttaaagcgatatataccgccacgctcacgcacgccaagaacttggccaaattcgtgacggtttacaagctcctcttgatactccagcggagactgcgggcgggtgtgggtgcgggtgatcggggagcgacagcaggaacgagcgcgggaggcaagggagcagagcgaggactggataccttcgtcgccggactggttggcggatactgggtgtttggggaacgtactgctgtaagttcaaggcaagggaatgcctcgtctggcagaaatgtctgatgtcgtgtggatctggcgtcgtcgattgtatagatcaacgagcaggtaagctgccacagttacagttttagcaccggcgatgagactcactgtggcgtgacctttcctagatcgtactatacgtttcctcccgagtcctcgcttcgttcctccctcgattgatttcctctgcgaccagctcagcgtctctagcacccacagcaccttcgatgttgccagccaatcttcgaccgctctccccgctccctcccttaacgtccaaggccgcgaatcctcggccggtcccaccggcagatgcgcctttcgctctgttcgccgccttgagctggggtatggtcatgtatgtctaccggcatcacggggagagactccagccaggaatggtaaacagcatgtgtgagtcgaaggcggcaagattgtcacgcggaatgaacgctgacacggtattctaatgatacctcgctgatagcatatctataccgagattccgaggtttggagcaatcttcggacacttctctggcacaacaagtagatcgtttaccatgcatatttcctgtttggaacgaacacgaaggatcttgcagaccagcgtccaggtcgcatgcatatgggcgtgagcatacatacaagcgagtcacgacacgactaaggtctctcgtggcctaggctggtccacgcgtagtcaatcggccccaggcatgcccatagatctgcatatctgtaatttgtatcgaatagtttgaccgttctcttgaaggcaattaggcatgtcgctcatcgtttccgcagccagcgatctattgtgcggtcacgtgatttatcttgaatcgtgtgggaacgattgttacgtcaatcagtctccgcctcgttcaaactcgggcgatacctcgatcagggttcactttcggaacgctcggacttgggggtccgtcagacgagatctgtacatatcatcagcttgacctagcctccgccaccaacagtcaaatcaaatttggccacatcgtctggaggagtgaagaagagtcttaatccacctaaaattcggtagcgttcgacatggtctcggatctagcggaggttaagaattagcaatacaccgacaggctatagcgaacccgacttgacaagaccggccggcaagcaatcacaagtcctctcacaacctctttccctcggctcggtcgcgatgagcccgcgtcggttcagcacgatcagtgtgataccacggagattcagtaccacagtcagatacgacgatgacatcgacctggagctccgagccgatctgctgcggccgggacctcaacctatctcggcacactcgcattccccatcttcagcatctagtgggacgttgttgaatgaggaatgcaatgatcggatgagcttggatagtactgctcccttgcagggagttagaagggtcgaggccatccaagcggtatggaccaaaaagagccgttatgtcctattcatcgggtgagcatccatctaggagaatcgtctctctctttcgctcagccgaatgtctcgatcatcatagactggctttggcttcttatgtctactccttggacggtgagctaatcccagtcctacgccggtaacttctgctgatatactgtcatatgcgttaggctcgaccacttggcaattcctcttctacgcaacgtctaccgtgtttggcaactcgtattccggctcgattactactgctgcggcgatcatcatcgctgtgggcaaacctctgatggccaagctggcagacgtgtgagtctgccagacgactcgatcagaccggtcgcagtttgagctgacgaactctctcatctataatatgctgtcttgacagctttggccgagccgagtcatacgtcgcggtagctgtgagtcgagaattccccatcagtgcctttgctcgtgcgactgaagcgtccatgccacaacagaccctctacagcctgggctacggaatcatcgccacctcgtcgaacatcggaggattggctggtggcaccttagtctattcgtaagcatggtctcgaatcatgatccgagggaaccttagctgaagcactttcatcgatcttgatagattcggttacacaggcttgcaactgctgtcgcagatcgtaatagccgacgtgacgactctgcgatggcgaggtctctccaggttagtagctcccaggttgaacaccaagttttgcaatcgctgagagagccagcattcgcgcagcgccttgttgtcctttccgttcatcatcaacaatttcgtcgctgccgaaatcgcagaaggcatccttcctgactggagatacggttatgggttattcgcgtgtgcggtaccactctgcctaagcttgatcgtcgggacgatgttttgggctcaacgtcgcgcacggaagatcaatgacgaaaagtttgggtttcatcaccaagatgtcgtctcccgtcaaccggcagaaacgtggatgggcgtcatggtcaagaacatgaaagagatggacattgtcgggctcatcttgatcacgtcgagcttgtccttggtactcttgccactgactctggcgaacacggccgataaaggatgggggaatccggccatgcctgggatggtgagtagaggaacggcattgcgcttctcgtcacacccttctttccccaacggctgttaatcaaagtttccctcgatcccgttcaggttttggttggggtcctgttgtttcccgtcttttgctggtacgagggcacctttcccgacaatccgatcattccctacaagtttcttcgaaatacttcgatactcggcgcatgccttattggtgagtcccgcaccctctgacatccacgttgtagccttgcaaatgctaacctccgcatttgcattattcgctaggcttctttgattttgtctcgttctacctacaatttacgaatctctacaattttatttatgtgacgcaagactggtcgccaaggaacctatcatactttgcctctatacaaacgatggcgatgacgatattcggaatcatcggcggggcgatcatgagccggactcgggacgtcaaggtgtgtcgaatttgcctcgatctacatgtgcggagtcgtcgattcttcatcatcgtgctttcgtatagttcctactgctggttggcctgatcattaggctcggaggagttgccttgatgattcactcgaggggagccaatgggacgcccatggaactcgtcctgaaccaagcgttacaagggatcggagggggtttcgcttcagtaacgctgcaggtgtccgctcaagctggagtaccccatgccgaggtggcgaccgtgacggccatggtcatgctcatcaccgaggttggaaattccgtcggttctgccagtacgtgcttgtttaaagtctggcccgacgtagcgagctcattcgatcttgtttgcacatagtcgcgacgagtatatacacccgggagatgcccaaagccatcgcacgtcacgtcccagggaacaacgccacgctcaaaaccgagctctacctgtctccaacgatcgctagagatttccccaaacacagcgtcatccgaaacgccatgatcgagtcttacagcgatgtcatgttccgacaactcgtcgtcgcgaccgccgtggccgtactaccacccatcatatgctactatctcacgaaacaagatcgattggaggatgtccagaacctggcggatcggagagatctggcggggaaccggacggatgagtcagaggacgggttgagcgggatctacagctcgctcgatacggagccacggacatagacggcatagggcaacgcggatttcttaagccaaatcactgtaacaccaggagcactttctagcatagtcatgagaaaccactacgttgtattatggacccccttgagatctagacatgcatgcatttggagcgtgatacggggttgttgctgcccccggggaaatatcggaagcaacttgggatgggcggcggagagatgcccggcttgattaatacgccgtggcaccggcgttgctcagcagctccaaataggtatatctactactagcgacttgacatgatgtgatatcgcatgacagaaaaggccatcgttaagctcgcagatctaggatcgagagacagacttataaaatggcaccgtacgaattacgctggggaatcattgcgaccggagggatctcgactcaattcacaaaggtcagtacccctcgcgacgagaaccacgtcacgatcgttctgaccttgtcggcatccgctttataggacttggtattggaccctgctgggtaaggatagccacttgaacgatttgaaagcgaggattcacgacgactgactgccacttttaggcgagaggtaaccgatgtcaaacacgtcgtcagggccgtcggatctaggtccaaagaatccgccgacaagttcatctccaacgtcctaccctcggagcttcaacaagctgcccagggtgggacttatgaggatgtgtttgcgaaccccgaagtcgacgtcgtttacatcgggactcctcacacttatcactacgagaacacaatggacgccctcaacgctggaaagcacgtgttgtgcgaaaaggtatagtcccgctacatcatcattgacatcatcaccacgctgatcagatggtatccggtcctagcccttcacctttgatgtcgcagagctggatgaaatgatcgctctcgccaagaagaagaacctcttcttgatggaagccgtgtggactcgattcgtaagtcgtcgctcgatgatcccctacttatttgacagctgtcgctgcagcggagtcgagaaactccgagctgtccagcctattgaaacgctcccatcacagtcagctgactggattcgctcttcgtgacactcgcagcatccgatcgcttatgctgttcaggatgccatctttagcggaaaatacgggaaagtcaagcgtgtgtgagtacaaagtgggcttgtgttaggtggcatggatctgatcgtaacgtcgtgaagctttgccgacctgtcttttaacatcgagcctgacagtgagcatcggttgacaaggtgtatttataaacatgtctgaagcttctttccgatcgacagagcttgatgaaaagactaaccgcatgatcgccgctgacctgggaggtggcagtatcctcgatcttggaccttaccccacggtaagcccgcgatgtaggatcggggcgtcctgtcagatcgatactgacctgtatccctgagtacaggtctggacgatgttgatcctgcaccaacatcccgacaacaaggatcgcgccgggccggaaactgtcaagggtcacatgaagatttacgaaaggacgggcgttgacgcatcttccacctggatcgtcgattggaagaatgtcgggactgccatctgcacgtccagcatcgagacgcagatgaatctggagaaatgcgtgaccgtccaactagaggggggcgagattacgatcgattgtgagtctttccggaggtgaacttgctgctcgaaaaccgtcacccagcaactcatcacctctctgtcggcttagtccctactttccgccccgagggatttaccatcacccccaagccgtcgtcgcgggacgatgctgatcccgaaggcgagggtagtgctaacccaaaggcggacaagagcgagcaccacgcacaccctattcccgaagctgccggtcgcggaatgaactaccaagccgagtacgtccgccctttttggctcttcatgctgattcatgctgacggccattccgtgccgcattgtagcgaggttgcgaggtgtatccgtgatggcaagctcgagtcggagcgatgcggtctcgatgaaagtcgaatcgtcatgggcatctttgacgaagtcaggaagcaaggaggatacctgggcgggaacgccaagggcaaggccggtaccaagtgaacaacgcgtttcggtacggccgagccgagtatactgcgccgtgattgtcggtagccatcttgtcttgtggatgaagcgaatcgaattttcgactgcgagtatctggctcttctgggcatagacggaaggatactttatatgctggcgctttgcgagtgcccggtctgcacagctcctgaactcgtccagcagaacactcgtctgcagtttgcttcaatgtacagtactggaggaaagtgtctctagtcataaaagatagcatagtcgagctcggcggcatccttgcgcctgtcgacctccttacattatcagtttcgggacgattgttcgctttgctccttgcctggacgagcaacgagtgccataaatctaacacacttcaggaagacgtcggggcgcttagattgacccccctgacccaggtgttcgctcatcgaatggccgctcgcgctgtcgtcaagagtatttgaatgtccaggttaaaagatttcagggagctggagagaacagaggttccgctaatcattgacgatcgacgtaccctgccgctctccgatggatcgcgtacggtaggtctcttaatctcgtcacacgaggcttcagtcctaccagttgtcgtttttatatgatctcacagtgtttcctgttggcacgctggccctcgattgatctcggtcgacctaaaccgcagctcccccttcgctctgtgtccacgaggtccgattccagcggcacatctcgagactagaaaagcttcttcctgttcattcgcgtccattatattatccggtatttataggtatgtacaaccgtcgatccacattgcgttctcccggagatctcctagctcaacttgctcaactcgcgctccaaacgatcttttttgcccttgagcatgatgaacctcctcttttgcaccgcgtcgagctgtttcatgtcgaacgggatcttgcccggatttcgtgagacgttcgagcccgtcatcccgaggtcgagtgatcgggatgtcgagttgataggcaaggtttccgggtccagggatgattgtttgaccagttcgagctgtagcggtgcaagagaagttagctgggggggtccatggtgctgcgcgagtgggaagatgcaggagacgtagggaaggggcgggggggcgtacggtctgtcggagatctcccgctcgtttctcatgccgcgagatggccttctccgcccggtcgatgaggctatctatctgaggagatagatcgtcggcgagttctcctttgtattgacggaggaggggttcagggaggaggaggtaatgctacgttgatcaaacgcgggaaatgagcgtgtgcaaacgatcagtattcgcaacagctaggcacttccgaccaaaactgactcacgcgttcattatgcagaatagcagtcagtctaggaagatctcggatcccagctgataactgagtgatggccctattttgctgtgtatgaaagagacgcgaggatggtgtcaacagggtcgttcggccacctccgaagggacatctgttgaacaactgaccgtctgcacgcattgctctgccgccttgacgcattcttccaggtgatagaggttatccgacattccaattctgacgaaacctgcctaaatgtgtgttgatagagtattctacgtcgaacaagaagtcgagtcgaccagattgtcaacaaccaacaacaactttgaggtcgatgatggcatgatatcgtcaacaaacacaacgtcaactacgagacgacgacgatgataagcgcaaaagttcgaaagccaaatagaagcgcactcacatcatcacctcgatcactggccatcattcatcatcataatatcatcatcgaccccgatctagcttgtcgatttcgtaccaccctccacaccgtcaactctctcgtcgtaccattcgaaaaaaacatccaccacacaatcattcgacatggaggcggaactcgaagcgtacgaataccagctctctcaggtcaagctctcactcgaggccgacccgagcaatgtcgagctcaacacgctcaaaggcgagttggaggagatcattgacctcaccaagcaggccatcgggggccctagcagtgccgggccgggaactacagaaggttcgagcaagagcaagggaaagtccaaggaaaagggattcaaggcgggcgacgaggtctcggcgaggtacaaggacatgaaatggtacgtctggcccggatgaactcggtatcatcacgctcatcagtcgttccctaaccctgtaggtacccagctcggataacggccatctctggtccttctgaagctctagcatacactttgatcttcaagggatacaccactcccatcaccctccccgcagtctgtctcaaaccgatctctgaacaacccgtcgaatccctcgccccgccctcggcactcggaggtgtcaaacgcaaactctcggcggccgaagaagaaaaggaaaaggagaagcgtcggaagaagaacgagaaatgggcagaaaagcaaaaggaaaagacgcaggagactttgcaaaagaagagcgcctgggagagtttcgggaaaaaggcggccaaaaaggggcacaagatcggagggtgagtggggattctggggaggtccgcgaatcgagactgtgccatctggtcactgagcgtacgttcccgtttggaattttagactggagggcaaatcgatcttccgaacgcccgataaccctactggtaagcctgatgcgttgttgatctgattcgcgctggtacacgcctgacctacttttcgtcctcgctcacaggcaaaggtcagtcttgctggagcacgcacgatcccggtgaagcacgtgctgaacacatgagccctttcattcgcagtcggagtcgtcggaagtggacaaggagtcacctcgtatgacaagatgggcaaacacaagttcaacgccgccggtcagagagaagattgagcgggtttcgccttggctatctttcttgatctctcccgtcgtggtcgagatgacaaggctcgtcaagagggaagaggaaagcgatacatctttcgtgccagggcttcatatcgatggaggctgacctgatacgtcgaatcggattcccgaatagcccgaaaaaccaaaattcccaacccgaaaagaggccataatgagacaacacccgtggggatacatcggtcatgaacagtggggggttactgccgcggatgagtctttcttcccctccccctatcctctgagcacacgtaattcttctccccgaaagctccgtcacgacaattggtctgaacatgaaccaattcttttctctccccctctttccaattgcgcttgtgatatcacccggctcgattgtattactgcaatatcatgacccatttgtacaattcgcaacgaaaacgaaatacgaccggttcatacatcatgcatcgtcgccgtcttctgaatctaggcattgtgcttatcgaatcgtccctgattcggattagagcggctctaggaacgatttgtatccccgacgacgaagggacatggtgccgacaatcatgaggcggtacattagtcattgggggagccttgaagagtcacatgggatcgcagtctcgcataccaacttccaggctggaatcccgatgatctgtagagatgcagctcctgacgcgcggcgttccgtctgcgaccctctgcgatgtctacgtccaggttatcttcacagcgatctaccgttcgaaggtctccctcagtcaatccgctaagcctggtcattgggctatgcaagacctgggccagacggaagaaaagcatcaaggacaagaccgccattccgtccatggataattcggtcttgtacgcttggaggaatggacattgatagcgaccaacacgctcagcggtacagctatacatcgctcttgtactgcatactactgatactggcaaatggatagcaagggacgttttgctggcaaatcgtatctcaagctggcagcgaacaatctggttgaggacgacccggaaccttgaacacatggagcgtccctctcaattcagaaacgtagggcgtacagacatcaatcatgcggtagtatttccgcgccttcgcaaatctacgggatcccctagtggtaaatctgataaagttgcgatatcccttaggtgagctagacgtgctcttgaagaaggagacacccgcagcttgttcatctccgccccgcgcatggcgatgatactgattctgatactgtactgttgttagttgtcctccatgtagccggagcacccagcttggattcctgagggacctcagaacgtcgtgctgcagcatgcgcatcgacggttatatttcagcaagttatagctcagccgtttgtaggatccaggtcgtatgcgatgccggttaatagcggtaaaacattcgctgtagagttccagaatgacttgatcacgatctggttcacgaaattccgagtacctgaatcaaccaggtggacgatgctgaaacgtctcgccatcaagctgaccggttaatgcacgcaacgccgaggttccggttatttcgttgaaaaatcgattgaaaacgaatatttattatttcgttccaacatcgagtcttcgccggtcagagccgctcggcatagtacagtaaccgttccgatcgatgacactgaacgcttgatagaacgctcttcaacctcgtcaacctcgtaaacctcgtcaagcatatgacaatcctaccctccccgctgattgcagtgtaatttcagccttgaattgacatctccgggaacgtatcagtcatacatatccctccaacgtcacccaccatgtcgaccatggaacaaagggaacgatacgagtctctctaccacgcgaccactcagtacctcctcgtccgtgatttcaaaagcgccgaagactctgtcctatccctccttgactctcgaccgcgggacgagctcgagcaaaagctcatcaagtatacggatcggttcgagccgaggttgaagcgatgggccagatcttcagaggatatgatcaaggcgtacaaactgtacgctttcgtcctcacgtcgagacatgccgagaggttggagtcggttcaaaccggatcatcaggagcatcgagggatctcaagcaagtgtttgataatgttatcagcacatacgagaccgaatcggccgtccccggaggaggacccgataatgggaactctgacccaaggcttgtcgatctccacccgtcgatcctgcagaccatcctcctgtccctcttgaaactcaatacgagctaccctgtcccatactcggaatccttaccctcaacagcgaggtcggaacaccccttgttcatcgctcggacgttcatcgagcggtggttggcaggcttggaggaagagacgatcaagacgttgtcgttccccaaaaagtttatcgcacgctgcaaggcttcgacgtcgtccggctcgaatggctcagtaagaggatccggcgtaccttcaagagaggtcctaaccgaagttcttagcaacaataccaataccgacggtcatgacagtgccgacgacgactgggcatggtatgctatctctgaacgactaggcgggatgaacaagagctaccgagccgtcctgaggacctacgttttagagattctgcccaggttcggggattgggatttgagcagggatatgatcttggcgggtcttttcccacgggcggaagagcaagaggtatgtcgaatgcaaaggcctcatgctaggcggtcgggaatcatctcgctgacgtcttccgggaacgccgatgcagaaattgttgaaaaagctacacacgcttgaactccagcataaacagctacagagggcgaaccagaccctgatctccgcctcgacgtctgatctctctagatccacatcgtccctctcttcctcgttctctgaactggacgcctcggaatcgatcgcagggccgtcgacgatcagaccatctccggtcagacctcctagtccgagtgcggcgagcgtacagacggataggacggtcagggcggtagactatatgaagggcaggaaggcgctggaggtgccgggtcgacaggaaagcaggaatgggatgggtagcgccgagcggggaacggatgaaaaggcagacgagaggggagcgaacgaagagtcgggctcgaagagggcggacgacgacagcgtgggtgagtcgaggtcgacgttgcgactggataacgacgtttcctctcaggctgaccgcttttcgacctggaactgcagtcggttcgacccgctcattgacacaaggatcggcaaggttcggacacgccgcattcgagacgctccgagcgcgtatcgtgcgttacctcgatacccctatcgacggtgatcccgaacgcggtctggatgagacgtcagacgatcgtcgtccgcgcacgagacgttctctcagcatttctcgtcgatcgaacggggctgccaaattaccgttgcatcaacgattgtcgagaaactttaccttcaggctcgtcgtccgagcgttaagcctcgtctcgattgtcgcgttcgtgctgagcctgatcaggcgaagacgacggagacgcgcgatggcccagggcgggtcagttgcgggcgagatggatctcgtgcaagatgtcagggaagcgttcgcggtggtcaaggaaaaggtgatggcggtgttcaagatggggacaaccattagctacgtgtagtaaatgtctttgatgaccatgacgatgggaacgtgttgcagatgctcatacaggtcggaaggcctttctcagactgcctcttgcagaagtcctcgtttccgagagagattcatcgcagatatcttccaagacttcactaggtttggcatatgtggtctcacttgcgacaaggtatgctggcacaagaaacagctacacctgctcattgaggggcccttggcggcgagagaaaggttgtgtgccttgcgtgttcccttacccatctcagtcctgctcgataaggtttgccccggtcaggtcctgtatctcaacatcgtcgtggctaacgacgacgatgctgtcaagacctctacaagctcgcaagtagcttgtgtcaatgtacgccgaatcacctgatagtcccgacggttccccgctcagcttgtgggttcaactttcgcgcgccggtggccgccggtccgactttcccgaaaacacttctcgaccaggtcacaccgatatagacaatgtgctacactacttgatttcctctattcattcatatagatcaagttgctctggtacactcagctagtatcatcctttgaatcatgtcgctcgtctctgatcgcaacctccccttctttctcgccgccgccgcgctcgccgtctcggctcaactcgctacctctcccaccaaaggcgacgtagccgattctcaagaggaccaggaaaaacgagaaatgacctcgacacagcaaccgtccgccgacgtggagcctcccgtagatgctaccgaggctaaagccagggtggagcaggagttggaggaggagaggtttgcgagggtcgaacaaggtttcgctcagcccgtcgggggcgccaggccggcgttgatcattgtcatggtgagcattgtagccattcccgctcttcaaaacgaggtcgtatgacttgtcgactgacgtccatcactttctcttgccttattggggcttgcatgaacgtagggacctgcttcatggtgagtccggataacacgccctctgacaccaccgtgctcgctcggctgacatcatcccgctcgctcatcctcagcggtaaatccaccatcggcatctccctcgccgacgccttcaatatcccctttatcgacggcgatagcctccacccgaaatccaacgtcgaaaagatgtctgcagggaccccgttgacggacgacgatcggttaccctggttggccctcatccgggccacggcggaacgggtctgcagagaagaatgggtcaccaaggagcaaggcctctttggggtcctaggggatgacgggaatctgaatagggatgtcgaggatctggcagagctggcggattgggaattcggggaaggatggaagtggaagaagaacttgaaaaaggggacggatgagagtctcggtgtgcccaaggaaggtttgggcaggccggccgtggtcatcgcctgttcggctctaaagaaatggtacagggatatcctcaggggtcatcatcccgtcgagatgcccgtccaggagatcaacggggaggataccgacgaggcgagtctctgtgtgacatctgttgattccttcaccgctagcgagacaaagctgatctggatctcgccaccgcgtcgcgccgattgcagaaggtcatgacgcccaaaccgtcccgtatggatacctactttgtctactgtaaaggtacccgcgagctgttgcaagatcggatagctaagcgcaagggccactttatgggagccaaggtgagccgccattcggcgttgcgttctgtcactatcgagtcccagtcccaactgagacgtccaaatccgcaaccctgtgtgatcttgtcctttccctggacagatgctcgactcgcaattggctaccctggaagaacccgatgccgaggacggcgtcgtctcggttgacatcagccggacgcccgccgagatcacgcaggaggccgtacacaagatgatcaaggtctccaaggcctgattccataatggatgttgtgatcaggatcgcaagatgacgccgctttggggcttcgagacgttccatcatagatggtgattgaaggggaaaagcgaagatagcaaagaaaccgtgtacgagcgtgatgcctggacctatcgagatcatgaaacgtgcgaacggatccagttatccctggaaaccatacaggagaggtgacgacagtctagcagtgcttcttgagggcatcattccgtgaacaaggagatgcttcatggacccgacttgatttgctcgacgcgctcgataccgtcgataaatgacccgactcgaagcgacaagaatgttccaatcatcgactgtcatgaagtgtcatgatatgatcgcctttccatattacttgcacttgttacgatccgtcgctcgttgtcgcaggagaaagtcaagtcgacctaattaaccttttctgcgccgttaccgatgttggcgcgtattctgactgggagtttgacgtcatgcaactggcaaagaacgatctagtgtacaccaacgtactctacagccaacagtgatgtgcactactgctctgctatcactccatcctagcctcggaacctcagccagctatcgttagagcgatataacattgcagaatagctatcgagtagaaaggggaacagcagcatcggccctggtcgtcagcaaacatctgttcatcatcagatagctacgactcgcgatctcttcggacctcgtggaaaaggagtacaaccctccaggagccttgccctcattcccagtcacatccatctatccggaacgactctcgagggcgcaatagcatagactgcaggatgacgcccgtcaaccgactagccgagttccggacggtcctcggatcagccaggtcggcagaatcttcgagatatcccccttcttcccgtcctggctcacccagcgtcgaagggaacgggctcttgagccgagcgagacggagaagaaagaggttgagcgaagaggagatcagagagcaaaaggaggagagagagtttctggccgaggggtatcagatcgtgagtcatctccgaccttttgttttacgagcatgccgtatgaacacgaacgctgagaggagaacgagacatgtcacgatggatccctttgggtatcagcataaacacctgagttccctcacacaacatatcaagctcatccgtcgagcctacttgtccacacaagcacctccgatcgcctcccgagtgcacacgccgcaacccaacgctcgtgctcgcgtccagggggaaggggaggacgatccagagcagaaacggctgagggctttggaaaaggccaaggtgttgacggatagggagagggaagaggtcgatctgaggtgtagggtcgtccttcagggatgtagggaacgggtcggggtgctggaagtcagggaaaagagtcagtcctcggaaccgaaacaggcgagaggatgatgggagctgatgagaactgctacgtgttcgtgacagttcggcaaaacaggacgaaaccatcgacgacgtcgtccttgttgacgaccttcttaccctccctcgctgcggacacgtcgacggggatcacaccgcaacagcggtcgaccatcttgacggcgcaccacgcttccatcctctggtcactgaacaactcgctcttgaccctgagcgataccgtcagggagatgcaagaggaacgaggcaagatccgggaagaacggggtaggagtttgggaggcatggtcgagaaggatttcgtcggaggagggttgggcaacgtcttgacccgtcgacgactaggaggtgatgggaaaccgatccaattgaccatccctacggcgtcattcgtcaagccaacatcgtcgacgtcctcggccgtcgcactggatcccagcgggtcattcacagcggataatacggtcaccctgtctgaccaacagatccaacagtttgccagcgagaacgataccctcctcgactctatgaacagcaccctcaacaccgtgctccgggccgaaaaatccctgctcgagatctcgcaattgcaatccaccctgatcgcccacctggccacacagaccgaggcgatcgagttgttgtacgacgaagcgatcgagacggtagccgatctggaccgggcgaatactcagttgaaaaaggccaaagagaggggcaaggaggggaggttgtacctcgtggtctttttgttcatcgccagcttgaccttgttattcttggactggtatagttgagacggagatgcatcgataatcaacggcaacattgagtgctaccagtgtttggtcatgaatgcatgcatgtcgaatatatggatatgtcgttgtaagctgttagaaggaggatcgagttgccgcgagccgtgatggccgaggatcgagttgctacttttagccggatcggaatatcggcaacaacgacgacgatgacggcgacgacgacgacggcaacgacaacgatataggccacagaaatgttttcataagatttggatcaggttccagatcactgaatcgccatagggatggtatcataatagaggttctgtaaatctagacctcgcaagatcgcaaggtcgcctcatacttttttagcatacccgtctgtgcagaccgtcgatcgagcgtttcaaacgaatcagtgtaaaaccggccatgacggaccctagaccaggccgagcgaggtcgcaaaccactccgactcccagaacggggctgtaccgcatggtcactcctatcgaccatatcgataccctcatcctggacgagaacaaccataacccgacggacagtccggcaggaacgccgaggacgagcctgaccctgatcaacggtacggagggaccgttcggacatccagaggttgacaacaggcggaagatcgatccggtctatgaagaggcccttgagacagagtctagctcccgagatgaccagatctcaagggagaaacaatcgtctctctgggaaaagcgacccgatcagaatctgtcaaagcgggagagggccggttcgaacgcccgccgacagtcgttgacgaggaggatcacgggcacgttacggccgtcagcttcaagattgagcgaggatcagggggtctctccagaggaaagaaagtggaaggatgatatcgttacctttgatagcaaggtccgtcttggagcgttggaccctcggctgacatctacacaaggctgaattgcggtcttctggccggtaatacagacagacccagctaatcccaagaactggagcttcaaggtccgtcgtcggtagaatccccttcaacatacctaaactgatcgctcgacacgattatgcagcggagagtgcttgttacgggactcttcggtctgacgaccatgtgcagcacttttgccagctccatcttttcgagtgctgcaccgtactatggagcggaattcggtctttccacagagacgaccgtcttgggaacaagtctgttcatcctcggctacgtaagtcggtcacgaatcctgtgtcgaaccggcgacgtatactgatcaggcgcatccatcggtcttaggtgccaggcccgctcatctgggcgccattatcagaggagtttggaaggaggatcagtatcatcggtccggtgttcgtctttgcctgcttcaccgtcgctacggcggtggccaaggatccgcagaccatctttatcacgcgattctttggcggtctgtttgcctcggctgtgagtctggcctcatgactatcatttgtcgcacgagagtacctgatgctcgtcgtgtggacgtacagcccgtcacgacagtgggaggagggcttgccgacatgtgggatcaaaaggagaggggaacggccgttgtgttttacagcctggcggtcgtagcaggacctacgttggggtgggtggcatatcgatctcgttggcttcgcactcgcttttctgaccacaggaatcgtcgcatgcagcccaattatcggcagcgcggctgctcagagctaccttggatggcgttggaccgagtacctcagtttgatcctgaccagcgtgatccttgtgctcgacatcatctttctcccagagacattcgcgcctgtcatcctcacgagaaaagccgcgcggttacgtcggtcgacaaagagatgggcgttgcattccaagcacgaggagagggatcgggatctcgtcaagtttctcgaaaacaatttgaccttgcccctgaggatgatcgcgaccgaaccgatggtcacgtgcatcaccttgtgagtcggctcggtcgacgtcccgacggaattctagctcaagccgccggtgttcaggtataattcgtttacatacggtatcttgtaagtaaaatcgagtcgaacgcatggctcgttctgagaccttggaccgctctaggtacatgctcttcggcgcgatacccgtaagcagttctcggtcagagcaagtttgaaccctcgcctatctgactcctccctgtcaataaggtcatctaccaagataaccgaggatggaatcccttggtcggctcgctccctttcatcggcatcctggtgagcacgacttgcgctcggtggcatcggtgcgccttatcactgatattcgattcattcatgacataagatcggatgcttcatcgcagctggtacttgtctcttgaatactaccgtgatctgtgttcatagttgacagtgtgtgcatttgcagctataaacattgcctggtcgacgtgcgtctttggtcctcacctcgagcgcaacgggggcagagctagaccggaaatgcgtaggtcccgaccgacatacgatcggccgtgatgaattgctgatatactgcactggcaggtctgccgacgatgatgcttgggtccgtcatgctgcccagcggattcttcatcgctggatggacgagcgacccggacacgcattggtttccatcagtagtcgggttcaccctcataggtgtgagcttcctgctcatcttccaggtaagtggagtctgcgctgatacgtcagaggatgatgagtgatgaagctgaaacttccggttgaacagtcgggtctaaactacctgatcgactcttacaccaaattggcggcgagcaccgtcgccagcaatacctttctgcgatccctgtttgctgttggtctccctttcgccgtctcgccaatgtttagacatctaggaatcgcttggcaagtttcggcttgatccgactctttctgggttcattatgctgaacgatggcttgtgtgcgattcagggcatgctcgacactaggtttcattgcgcttctaatgggaggtttcccattcgtcttttatatttacggtccacgacttcgggccagatcttctttgatagagaactttgactagtccgcttgtgagatggtgattctcgattgtatccagccttgtccagcatcgatgtatccgatttgacatttgcttgtcgtttcaggtatgtttgtttgataaccctcgttagaggttgacgtgtatttaatttacatccgatcgattcgaaaaaaagcatccgatcaactcgctcgctcgttcgaatgtgatctgtctagctaggacgtggcagatcaagcaaccggaacgtttggataaccacaaaacccatccattccaagcatcatcgtcgcctcttatcgtctgaatcagtgatcggactgaactctacgtctgatccacgtaatatagctcgttgccgttaccatggctggaggaatcaactatgacgagtcgggcgcgttggcatcctactttgccatctcgttcctctccctcatactctttcccaccaccttgatcttgctgcgacgggcagtcgtagggacgaaaggcaagggcaaagaatgcgagtgtgagtcatgtcagcgaaaggtcaagtatatgaagcggttcgcgaccgagggtagcggtctattctcgatacggtgagtcccaatagtaaccacatcacgaacaccggtcaattcgctgagcaggtccgtgatcggttcgatgcgactcagaaatttgctattgctcgccggatgggtggccttctttgcattggcatatgtcatctcacaatcggacggtaccgagaccaaggtgtacgacccctttgagattctcggattgagctcggtatgtttccaacggtaggactcgtcatcatccgagctaccgatcttatatcatgtctctacttgttatccttgcagtcgagcgatgacaaggctatcaagaagcactttaagaggatctcgttgaaatagtaagttgcgatcccccctcggtcatgccgagatccctttcatgaaccgtatgctgacgctctcgcccgccgcaccgacagtcatcctgacaagttcaaggccggcgataatcagaccaaagaagaagccgagagttactttgtcgagcttaccaaggcctacaagtcgtaagtttccagatgagcacctcccacattcgctcttttcctgatggccaataccgtcctcgatacagcttgacggatgaagccattcgggaaaacctgcggaaattcggtaacccggacggacagcaacctagggaagacaaaatcgctattcctagctgggtcgtagagggaaacaacgggttgtgggtcttggccctgtatggtatcggtctgggtggtggaatccccttcgttgtggcaagtccttttctcggtccattgcaaggtggtcgttagtctgactttatctactatcgttcactctagggtcgatggtggttcaaacagcgtgtcttgaccaaggacggcgccctttcgacgaccgccgagctctttttccacaacctgatcgaagacatctctttccccgctcttttggctctgatcgcttctgctctcgagatcaagacgatcctctccgcaaaatccggttccaagaagctgaagcgatcacgacagagtcagactgaagctttggaaaagaaggtcaaggccgaggccgagaggctgggaatgggcgacgtgttggccgcaggatgggagagcgagagaggcaagggtgtcgtcctgccgaacccgtataacaggcgagccgtggcgcttctctggagtcacctcttgcgaatcgaggatatcgaggccgagttgcttgatggtgagttgcgaggtaaagagccactcagctggagatttcgactgacaatgctgtccaacctcgatagaacgtcgcgagattctcctccaggttcccaaattcattccttccttggtcaacgtctcggttgcctatcactggctgaacaccactacatcgtgcatgaacctctatgcccagctcgtccaggcaactccttccctcgactatccagctttgcaattgcccgggattgatattgaccaggccaaggcgttgcttgagaagggtatcggaggcgagggatggcaaaagaaggtcgtggaagatgccgaaatcgagaaattggtcggaactgaaggaattagaattgccaaggagttcccccaattgcatgtcagtgatgccaaatttgaaggtgagtagtgtctcaacagcgcctgcaaatcagggaccgtgctaaatccaccgttgacacgcacagtcgagggagagagcagcattaccgtcgggtccctctgccaattcgtatacactgtgcacctcactgctgaagaaccctcgcaccaggctcttgcggcttcgcggaagaaccagaaggtggacgacaaggatgacaaggacgtcgtgtttgctcatgctccttgttggcccggggtaagtcccttgtcctgcttcaattcgacatgtggtgcattctcgctaatcgatggcgtgataaatcagcaccgcaaacctcattggtgggtcatggttgccgatggaaccagcaacaccgttctattcccgcctcaacggattggcgacattcccctcgtgacctccgacgaaaaggctgagggtgacgaaaaatccgccaagggcaagactttcaagttgactttccctgctcctcccaacgccggaagcacgtcactggaggtgcatttcatcagcgactcgtatatcggagaaaccgtcatgaaatcggtcgtggtaagtctggtcgactttggttctcggagaacctcgctgaccgcgtcctttgtcctcgtgtgatttccgcatgtcatcagctgacggtcgccgatgccgaagcagcaccgccaccagctgatgatggcgatattagcgaccccgatgaggataccatcgccggtcagatcgcgatgatgaaaggacagcgagtcaagaaggctaagggtggcgaggatgaggacgaggacgacacatcggacgaggagggtgacggtggcagtggcagcgatagcgacagcgatagtgaagacgaggcgccgaggggcaagaaggtggtcgacagtagtgattcagatagcgattaatcatgtggttcgaagtatgcattgctggctatcaatcggatatgtagcgatttgcacgcgcgttgatctgtgacaaaggaggaggtcatgaagaaccgtataagttgcgagcctgtcgcttcaccttgcgatcgtcaaggggcggatactcgtacatgcattcattcaggcatcgtccgaacatcatgacatgcgatgactccgaacaatcttgccagacgacggaagtcttgccagatcagcctgagaacgcgtccatgacaacagagaacaccgcctcgagccaggctgggacatctgcagagaacgagggcaatgtcgatcctggagttaccatgtctaatatcatgagccctccgaccggtaagttccatatgaacagatgccatgttaccgtcacttgacaaggctaagtggatgccttagaggaagagcatgataatcacaagaagttcggctcatacattctgaaggtgccggaaaacaaagcaaggccaaatggcccgcaaatagatatgagagtataccccagctatcatgaaaccatgatcgattattgaagacgtagtatctgggactttgaactccgctgtagtctctgtagccggcctccgatcgtgaacgtcttggattgccaaaagaactatgttgactacccgccaatctccaacctctctcttacggcctctgccacctggtcatcggtaggcgttcgtgaagatcccaaccactgttcgagccagtatcgtagccattcgtccgccgccatgagtctgtatttgccccatccttcctgctctttcaaaaatcgcatgtccttcggttgcccgctatcggcgagcgcctgtagcaccgctatgagcgtagcgcgatttgggtcgagcgagagtcctttcatccagcctagggccaagaccgcgtcgtcgtatagagactgatgcaggagcgtgacaatgtatacatgaaaattgcccgaagacagcttgatgttacggaagggcggatcgactggaagtaattgccaggggagcgacttggaaaggtgctgttcttcaacggacgcggaaggtgaatgacctgatgctgtcagctgcctgaatgcgctgctaatgcgaccgtcttccattggtgacttgatcgacctcagcgatgggtaggtacccagagcgatgtcgcggaagaggcctgcgacgtcttgccattcgtaaatggcatcgacagtgaatcgctcggatctcgccggggcgtttatgggtttcggttgtccattgtgttgctcccagtcattgcgaccgcctttgttgtccttcagatatgctaagtcgatgcctcggatcatactggccaggctgtcatcatctggctcgacgccccaccggctcgacatgttttgccacagccaggtcgtcaggtcgggacgaaggtggtatcgggcgatattcagcaagaccttgacggcaatgttatcgatccgagctcggacatcgtcgccatgtagtcgattcggctgctcggcccaatcgtcaacaaacgaaaatgcctcttccgccccggcatcccatgatttgagtttagccccaagcatgatggacattgcatcgagctgtttggtatcaacgagttgttgccaagactgccatgccgaattcgacaaatgtcggttggtgtgatgatacatctgcgcggtcaagatgccacggtcgtcctgcatttctgaaggaatctgagagcaagtctcgagccattctcgagtggacacggcccggttgtcgccgagatgaccgagcaatacgacccaagcacgacttcgtaattgtcgcaggtcttggtcgggcgcgccagcagtgagacgctccacgacaccgaccaggtcggatgacatgcgctcgttccggaaccccgccgccattcccaccgcacggtccatccctcggacctgctcgtacgtcgcgtcggccgattgagagtcctttagggtcgcgtccgaggcaattttgttgccagcgaggaaattcttgcgtgcccactctagctcttcatctcgcagcgccgattggaacaatatgtcgctcatcctgaccgtcatctcgccgtggcccagagcgcggacttggctctcctcacggaatcgcaggtagcttacgccatccaccaacgtcgtccccgagggagcgaacaaaaagtccttgacgtgtgggtgcatccatcgatcgacctcggcctcggcgaaaaggaggtctcgatctgcgtctgacgtgacgacgtcgccgttggcagcggcctgtcgacggcggtacatccatctccagatggcttgtcggcctttaccgctgatgactctcgagtccaacaacaagcccatcagcccgagcctccagcctacggatctgtcgtgcatgtgaagcaagatccggcccaagagccgtctcgccgggccttgtagctcgtcattgatcgatgcttgcctacgcgagaggtgcgagacgagtacgaggatcatgggttcaaagtcgctcgtcctgaatctggtagaccagtggacctttgtagcggggactgtacccggctcggctctcaacgtgacgatcttgggtcctcttttgacgaccctttcgaggaacatttcgcccagactggggaggaccgctgatgccccaacgaatcggcctgcacgtttgaccaggaacgtcaagatctcggcctgatcttgcgcaggataagccccggcttcgatcaacctgcaaaacgtctgcgtgagcaagaggtagtcggacaaggtgtgtgccttttgatacaagaatttatggagtaggaagggcgggaggaggagcgaaagattctttgccggtggttgctcttgcatgtactcggacgggacggccgacaagcgcaggtctgacgccgttcgcagctttgtgcccgggacgtcccctgctcgtcgtacgcccgcaggaaagacctgcaagaaactctgggggaccgtcttgcgcctcatctcgtcccgaacgaaccgcaggaaatcgacgagatcgcccgattctctccgtttcgccttgttctgcacttggacattgttgtgctttgcgctcgaccgcaccttcggtcgtacttctggattgttgggagattgctcgtcttgatccacatgctcgtgttcgtctgtatcgacaatacggggttgcacgaaaaatctgtccatcttggtccacgatctgatgagctgcctgctgaattgggtggtgacgaagcaattctggacgaggtgcgtgacgagttcctggagctgcggatcagtctggattcgagagccttggtccggtgtttccgatgtggccgatggggacgaggatgaggacgaggacgacagcggtgctagccgaggtatcgacgtatcctcgccgagactcggatgtgccgtcgatctttccaaaggtggtgagatgtacctttgaaacagattggccagagtcgtcgattccgacctgtccctcgagtcgaaactcggcctgcgagtcggctttgaggcagactttgctgtagtactgcgagaccttggtctattaccgcgaaacttgagtggtctgttaccgcgctccaattctctcgttgagcgtgtattggcagggatacctcgaaactctgtgtcgacctttgcatcagagtcgggtcgacgcagctcgactgcgctggaactccacctcgagtggggtatcgaagtcgaggtcgaatccgtcccattctcgctcctatcacctcgccgtggtcggcttgtttcaaaccccgctgagctcgacgggcgagcccgttcacggtagaatccacacgtacatcctcgagccagattggagcgggttcgattacgggtccagcccaggagcaggctagattgctgcgggaccgtcgtcttgagcgaagttacgagaagattcttgtcaaaggggtacttactagtttcatgagtttcctggagccgttggtgtggtggtcgactgggttgtatcgcaggtcggactcagggggaaacatgagtaggtgtccggcgacaaaaggaatagcgaacatctactcccttgacatctcgaggctgactacagaaagatgaccaagggccttacgtcatgagacacagtccccagccagaagcgcagagggtagcgcccgcttcgaaaggcattacctcatacctctcgttatccggaacgctctctcccccgtgaacatcacggttcgacaaattacttccggctggcgtgaaccggtccgagccggtaaaacggtgactcctagtggtactggacgggttgtgatctcggccgacggtagagaattgatcggatgtataatttgaatgacggcatgcttctccccccctcccgtgctcccccccccctttgtgtgattccgcgcgttcggttcaatttccgaagcatcagcagcaactcgacctccaagtgagagtagacaaacatcgggtcagcttataccagctacccacaactactactcggtcactctgatcaggtaatcacatccatctcattcgagcacattcacggggaagttttgcaacctcccgactcgtttaaagtcttacaacaaggaaaacaaccagatagccctcttgcaacgagctatcaatcagcctatcggtgagctacctgcggccgcatgacgacgtctttcaagaacgttggctcatccgcttcaaatttcaatcaccgatcaccggtcgacgatccccatcctggcgttctgcacctctttacgatcgtttgtcctcctccgtcttgcatctcgagttcaggaattcgatcgaggtcacactttgcgtcacaacaaacggatatcagcgataaccccgagaagggaaggattttctagatcctcagctcggcccggatcgataggaaaccagctcgaccgaacgtcgaagcgtatcgcatcacgaccctaccttcagaggtttcacactcggccatcgagaggtcgatcagaccgaggccttcggatcgatatcgacaggaattcatctgacgaagcgttcgatcgaggacggtcagcaactccgaggcatcctccgtgatcatcatcagggtgttccgcgaggcatcctccgtgatcatcatcagggtgttccgcgatcgttccggctgttgctttcggtgatccacgacgctagaggtctcgtcgaaaacaacgacgccgtacgagatcccaggagacgagaacgtaggtataaccatgtccacagctacagccacgaccacggcgtcgacatcgacgtcgacgaccgcacagacgacgacctctttgaagccctcggcataccggatccctatcaccttccgacgcccattcgtcacacccacacccgcccctgaatctgttgagccccccacaagcccgctcggggacaagaccggcgttgagatcggtacgcaggccgacaaatcgatcgtgaatagggacatcggcggatccatggaggaggttcaggagggtagggatatcgacagttcaaccaaggacgaggacgaccccgttgacgctcgcgacgatacgaattccggtcagtctcacgcggagagacaaagcctgcagagcacgttcaggtgtacgaggaaggaggacgagatcctggtcaggcggcatctggacaaggtcgcggggtcgaggaggatcagagttgatctgcggggtgatatcggtcaggacgctgggtcgagtgcgggttcgagtttgagcgcggggtcggggtcggggtcggattcgtcagcgacgatcgatgagacggccgaggacggacctcaggaaggtatcgcaccgaatgtttcctcgacgacgacgacctcgacgttcaggccttcgaggcggaaagccctgtcatacaccgtcagtgccgtcctcccagggaaagagacgaaatcgaacggatcagtcgggtctgctgagccggtgcacgccggcagcacgagggaagacccctaccagatgattctcagggggtgtctagatgggaggtggaagggcgaagggaattatcgaagtttgaaactctggccgggcaaggatgggtgagtcgagcgttgggccagggtagtggtatcgagtggaacgctcaaggctgacacccacaacggcgctgttcatcgacggatttcgcaggtcatcctcgtcgtcctcgtcgggaggatccgttcctgtgtctaccatctcgacccggtccgcggccaatgcgaaaaaagcagccgcgcagagcgccaagtcgaagcagaaaaagggcgggagcgtggggtccaagtcggccgatgcgaccaagtcgtccgccaaagatagcaacaacggcggtaccgccaacaacagcgacaaatcggccttggtggtccccggattgacaaccacggtcccgagtcccagtccgctgcggatggcctactcgcaaccgaacagcccagaggaggagggtgccccggcgggtatcatcgaccggctcgatccgctacgcgcgatcagagcgttgagtgagagcgggatgggcgagtcgagcaagaaacgccggcggccgtccggcgaggacgacgaggatagtgcacggtcatcactcgctgagcgggctggatcttcgcccccagcgaaacggcaggtcagagccagtgctaccagttccagcgtcgtaggcaagcggatcagcccaaggttgagtcacgccatgccggtcagatatgagaacggactcgggtccgattcgacgagcggtggcgccggtgcggacgacgacggtgatcaccgtcgaggaaggtcgggagcacccgagtcgggcgtcggtagcgggcaaccgacggacgcttcgggtctgggtaaaatgctgctcaggcgcgaggtcgagaggaagaaacgcgcggcgacgcacagtccaccgggcgtcaacctcgaggacgagcaggagaagaacaagaaatcaccaggcagcggaatgaggcgcacattgtcacacgacacggcgacgatgcgcgacgacggagaagtcgagctgggtatggccgcgggaaggagtcgacgagaggtcggcccgccgaagcatctgagagattacgagatggaaattgccgtatgagggcggtcgtgctttgttgcctatgtttgcgattataccctgtttgagcgagtggaattctgtaatgaccatcgagtggcgaatacacgggattgacactagaagtcgccaggacgagacaaagctgagggcagcttgtcacggccgacgatccacaagttggcggcgagtgagggcagatgaattccgatcaagattcgatgagagtgccgacctgtcgcttaagggggcagacagcgggaaaagggcgaaaggccagacctggtgggtggcagctcggaataagaataggggaaaggagagctctctgcaagcgagtgcaccgcaggcacccgactacgggttgggccgatctgtgggatcttctggcttgaggatgttatgtattacatcacccttgtccaggtgattgagggccgatgaccaagtggtaaggtaccgctttccggttaaccccgtgagaccggcggagatcccgggttcaatccccggttggcctttttttttttccatgcaactctttgggcaactggccagtcgctgtccgttttcgttggcgtcgacggccgacctgacaatatatcccaacgcgtataccagcgcacagtggtaatttgcgacggtacttctataatcttctgagactgctgcatccgtcactctcagcgacaatttataaatgtcacgcaaacactttattgcttcgtacatgttcgcgcacttttgctcatatcaatcgatctgcgacaaggcgctcgtctaacctatcacgattgctccgagatgatgtaggacgatggcctgagaccagtataggggactgcatgtggaacaccttgagttacacagtcatccttaccgatgattgggactcttcccagatgagtttgcgcttgcgacttgaaaggaggacaagcgcgctccccgcgatcgcttgtgaatccatgccgttcccttgacattggacatccaactcattaaccacagcttatacatgtgactcaaacaaaatcggtagttcggatcgtcgtctacgtctacggtgtggtcgtcattgaagccatgagaacggttgcatttgcatttcgtcccggcattcgccccataatgatacgaagggtttctgccggtggcatatgagggcctgcaaacaagaaatcgtctccaaaggatgtaatggcagtgacctactacaaagtctgctctgctccttttggtacgtaaattaccataggcccctgtgaaaaaactaacgccttcctggcgagacaaaggaaagtcccggagttagcaagtcatagtctgagggtcggtatcaatcaatatccacatggtaaataatacggccatgagctacatgtcgccgtcctcgcataacctcaattgctagtttcagcttgcatccgatggtgcgcagatattttaacacagggtggtggcgatcttcagccgtgatggaggccgttacgccgagcaagaagcaatgcaacatgatccaacgttgcctgtcctgtccgttcgaggacgatcgatcaggtcattactatcgcccgatcgcaggcttgcaccctgtttaggtgccgcggaatgacgcagaacctgacgaacgtgatttgaccacgtcagcaatcttttgaaggctgttgtacgcttgttgaatatcggcgaaagcgctgggaacacgtgaagatctacatgttcatgagcaaacagaatgcggtacagtccagcggaatatagagaagagtccgcttcgtttggccttctcaaattgtacgccccaccatggaaacgtatagcaggacatcggatgggaagatcagaaaaacaaagatttaggtcttccggtggtcatggcgtgagtacaagtctcagccgccttgtcgtatccgtctggagcgccgatgatctggccacttcataaaaccccttcaactctacaacctcgaccatttctcgtgcaagccgcctccttgcaacgtggattggattcggtgaattggtatcatggcggttgtcctgccgcgtatgaaagttgcttccatacgaggtgccttttcttggcgacagattttatcggcgatattcgcatcagcatggtcgtataaaagtccttgaagggtgtccgtctcgtacggaacacaaaatgagatatagagacattcaagcagaagcttccgtagcgagtctttgcactgtgcctctgattttgctccgttctgaatcctgacagtcgtgaaatcaatgtacaggtatctgttcatccacaaatttacaggctgtctgtacgacgtcataggttgtggctaggcctgcaatcatcacgaagagacagagttagttgaccgtttcaaggtaccggtaacgtatgtaaactgaccatcggtttcagcgtgtcctagtcaggccgatttggaactctcctgcttagattcaggctcgtccgacgctttgtcgggctctcccatgtacgatgtgttaagccactcgcccgattccgaccttgcggaaaggtgacattgcgtcttctttttaacgcaatttcaacaattggagagccctgaagggagatcatagtgccagacggaatgtcagacggtacagtaggttttaggtgtctccactcgatcccgcaactcacctggacaatccaggccctccctcttgcaattcaagcatttgatgcccttgcgtttcccgtattcgttcatcctgactcccggaggatagaagaccttgtattcgcctcttcagtttgcctcgaagtggtcaagtaattcgtccggattcatgtataaaatcggttttgcttgctgcgagtcgcttgcagtcgagccctgccctgaagccatgggaaggacagacgtcacggggagttgtgacgttgggggtagccggtgtgatcaagggaagagtcgcggcgggagaaaatgtgtccctcaaacaatggacgaagatattgatatgagcgataccagtataagcacagccagaagggtggctcgtgatttgtcgatgagttcgggctttgttgtgacagactggacagaatagagtgttgaggctactttaaggcagtgccatcgaggactgcgtcacgcaacggtcatgtccgccaagcgagtttgcgatcgggaaccagatgatcatcattcttatatcattattgagctccacttgatgagtggttgctgttgtcgtcgtcggtgactcaaagctcgggcgcagccggcccgtcgtttccaattacccttttgttatcgagaccggatcgctcttgcttgtttccacgacagacttatcttgcgtggcccaatcgatcgagtccagcttatctcgaatcggagcgtccaagccatgcaaaatttgggaaacaaatagaaatgatctcatttgttgatttggcacgtgatcggtgatcgctaataaacaagagccaccaacaagacctcatcgaacaacacgggacctattggtgataggatcttacgcaaggtttgtcgcggcaaaggatggtccgtgcgtgggttgaaacgcgggatccacctgcaacagatcgccgggacaaagagttccgcacgcgaaggtgagaacgatgtgaccatgcgccactaggtggatctgacgaccaacggcgatcatcatgacaacagggatttctctgccccgagtagtcaggaggacattacaacagaacaacgagctaaaaacgacgcgcggtcagcgatcagcggatttggagctattaattgctagatcgacttgatttgcagctttggcccagcttgcacagcttgttgcagtttgattgtagtcctgatcagaagcagttcgccgccaccgtatcgtcctgcctatcttttcctccagaacaactagatataccgcttactcgctttgattcatctcgatccggtctcgtcgaaagacttctccaattcacctcggtctacctatccgacttattcaacgtttcggaaccttccatcggtctgggctatatctagtgagagaaaggcacttcgacacataccaaagcggtcaatcagccgtgacgctgaaaatttgacgctgagacaagctgtatgtagccaatcaattgcacaaggcaagaagaccaagtgcccgtatcttatcacgttacataaatggaggcatccattccaactccggcggaatcgctcgatctcttccccacccgggggtctaatcctcacaataagaacggaccctccagggcagaattgaggggcaatcttcttcacgctgacgatggagtcgaagcgatcacgaggtcacacgctgaacacgctcagattcgaaatgacaaacccgcggatatcgtcgagctcatcgacacctgtcgcctccagagtgggctacttccactagccaaagacggggtcatgtatcaagccattcgaggctcagagcatccgcatcgtacggaggccttcctccgcgttctagtcgacgatcccctttcgctcgatcctgatgattggaaagacatcctgaggaaggacgagataccgaccttcaaaggtcccagcacgaatcacgagctcccggtagaacgaacaaaggatatctcaattgattcggaagaatcggacagcgatatagatatggacactgagaatttggatgaagaagcaagtccaggttccacgcagatggtgcactatatcagaatctggcgtatggacaaggataaagtgaggaatgctcgtccgaagcttcaagcctcgaagttatctgatgtccgacgttcggtagttcgatactttcttgcgcgaatgggaggaacgctttccgcaggacatcctatacattcgccttctccgaggtggtaatgacgaagttgatcctagcgaatcccgcgaggaacacaagcgaaagtcgatcgtgtatatctgtcagacgataggatcgacacctgctgaaagattgaagcaggattacgccaagatatgacaacatggatgttacagcactttaagaacgctcgcagcattaccaaagacgaggaacaaatccccatctccttgacatcgatggacactgctgcatgcgaggccagccaggcactgttcatggcggacggcgaaaccatcctcgtcgctaattgcggtaaggacattaccttgagagatgcctttacctcagcctcatggtacggacaactagcaggaggatccccactcagctacagatgggcggcagaggttgttcaaagtatcattgaaactgatcagttggaagacatccaggctactccgctatccgatttgccgcggcgtctcttgtctggtctggacatagcgactattcacggtcccttcgtagacttctggggcgtctgtttgaagcatcgtcttgtgtaagtatccgcactatgcatcaatgcgagcgaccggatattaactcaggcggttgcgcactttttgctagcaagatcttcggtgatattttttgcgagacattgtctcggctcaaaccacgagtacttctcgtagtattagagcaggtttccacctttctccggcttcgaaccctggctccagatgaggaccctagtctttcgtggagaggtctcaaatcgaatggcaagttcatgctgtcacaattaggatgtatcgagattgtcgcaatccgtagacactggtgtgtgatgttgagtgagtcgatcggacttgctcattgccaaatacaatttctcatattgtcgctgcagtccgctttgactgcggcctattcgcgtaccgcccggacaatcagagtttcctcacagagctaaatctgttactcgccttaatgggggaaatcctccagctgatcgcggtgaagcgacagcaatggaatgaagatgtaggtctttgtcagcccatcccgtatatcatcgtcgggtaactcaccgatagcgttatagattgctaggtctgtagccacggaggcggaggtcatcttccagcaaattggcctcaggcaagcttttactcgctcgcgcgaacaatttgcccaaaggctgggcaagcaattctccgtcgccagcaaacggctggcagcggagagcctgatcgcggttggcgcgccgcatagcgatactaggaaacgccagatgcaagcggtattggattcccattggagagacactatcggtcctgaacactatcgcgagaggctggaaattgcccagggtcacgatccagaagtgaaagggaaagagtgggaggactggttcatttctcggaatgaagggttctcttatcgggaggctctgagaggggcttttgtgtctgaagcaggaatggagaggaagcgcgccggcataagccacgcccgggacgcaatcgactatcctggtagacttgctacagggctgtctccgtcttacgccgcttcccacacccttctcgacatagccgagtaccttgcggatccttccaatttccagactcgcatggctggtaagttctaacgataccgacagtcctagtaatattgcggaagcagtgataaactctagagtatttgatagaatagccttcatatggatatcgacgtggacagtgcaagaaatgcgccgaagaagctctggtgtttggccaccaagtgaaacatacgtgttccgatggtacgttgacgactcatgatttcgaccgcgaaggctgttacccagccgaaatattccggccaatttgctgaatgcgctggggtcctttatcgcaggccaagttgtgaacgtcgcaaagcaaggtttcgaaattcatgctctattctctccggtacaactccttctcgaccctacctttggtcttcaattcaggcaattggtcaaggagaacgacaaattcctctgcaataggggtctcatcatgattgcgacacaatggaatcacccgcacgctcagatgttctacgaagagcaatatctctacaaggaggttttggtagagcatgggctgactctatgtgacatctcgaaggtgaacattctcgatccgatcgcgatttcagaagggctcgactggcagcatgagttgcttctcgtgtttaaaggatataagagcaatatggatgcggaatacctgaacttctcgactttgcgtcttccgtaaagtgagcggtagcgtgcaagctgtactagtgtatcaacctgaaaatgacgggaaagcaagaaaagcttgttcagatcgataatcatacgctccatccaagttccaatatcaattaggaggcactcacccttgcgggctttcttttgagcagatgtatcgctttgatcgcgttcgcccgccacagatttccttttcctttcggctaggaagcagcacaggttgtcgttaacgcaggctttacaattcggaaaacctatcgagggctcagctggaagttagtgatagcatataaagccgcctcaaggtggcacatagctgtggggttttacctgggaggccaatacgatagcaccagtttgactcacccggacatgctcgatctttctttcgacagttgacacacttctcccccttgacttttccgttgacgacacgcacgccgaaagggatttcgtgtttgtaatggcctctagctctggattcgaagaggtcaaggatccaatcgggatccggtacaggcgtggtactaggtgcgtaaactttggaggaggccgtgggctgagttgatgtcatggtattgcgggtatcgagatgggtgaagcgaatgtgtgaccagacagtgtatctgggaatgctgatatgtacgtgcggctggcttgagccttccgggaatgcagtatggctttgacctggtcctgaatccttgacccaacgctcaaaactgtgcagtcccgaaaatccaaatcgggcattgactgtttcgatcactgcagtcggcgggtgcattttacccatcccttgcccaaatcttttctaggcacatttcgaatttcccttccatgggtatggcttcatgggaaggctgtgcaatctcacaacatgagacattcgataccacgtgttctatggactactggctactggtcctccggccgaaggtttatcaatcgcacctcgcccagtgaacggcagttggctaatcaatcgcactttggtattcgacgttcttttcttcaaatgaagaggtctcatacgcgattgtattactgagtaaaatggtagatgcaggagtggtatatcgttataccttttcattgagcggaacagcaaccggattcgatagcaaggatttgttggcggatcgtcataaccgggtggggcatggactgcatgacagcagatcctttgaaaacgtgatctagcgccgccggatcgaacaaatgagggatcatgatgtgagacatccagacggagaagatttcctgtcaccaactaaatccgaagccgagccgatcacagcctctcacgcaacaacgcgagcagttcgaacattccaagtttgagaatcgagttctatccatttttccggttcttatgggtagtcttgtgcccatcttgccacaatgacctacctgcgacttgctcatccagtctcgtgcagaaatgacccgaggttcatctcgacgggattgctgtgctgcctggtggatctgatggaaggctcgcggttccgggtctgtgcgtgggttgaaacgcgggatctaccgggcgaacggcgagacatcacgcgcgtgacctctaggattgatcgcttgtcaccaagtctcggtccgcgaaaggaagatgccttccgatctcgatcgattgcaagatcagccggaaaaacacaaacgaattcgctacaggccatgttcgccggtcgccgtgccgggtcgacaaattcggccggacggacgaaggtccgaattttaacggcaaaagcaatcagacggaataggaactgtctactatcgaccatgagagggcttgtagcataccgctcaataagcggggatctcacccgcgcatgctcgctcggtcagcgagcttcagcatacatgtactggttggaccggtgtgtgccggattcacctagaactcagcggtcgagtgccgagtgcttacggccaaggaaagcgagtcgaggggcactgccgacactggcccgacacgggtcgcttttgcagctctccaaacgtcccgcgcacattcggcattgatacgcgattcccgacaccgggctatgcatgcgatgatacaactgtgaacgaccgactgcccctcttaaaacaagttcttgacgtcactttcggcgaatggcttcatgcacgtgatgcattttcgatttctgttgattagacgagcggtgagacactcgtcgcaaaaggctgggcgcgggcgagattagctctagatcgagtaccacgacgttccccgactcactatgtagacaaggcgcgaggatcttggtcttgaaacgcaaatgacaggccgtgcatcgcaagatgcccttgagtgccgcgccaagtcagcgacctggcaagttagcgcttacgcgaccccaaactcacaaacaacatgtccctctccttttgcagcgcggcttcacccaccgatacgcccttgccctgcgtgctcttcaacatcgattgactctgcttgagtttatgtttggtctcctcgatctcggtcttgagcgatcgattctctgcctgggcctgtttgagctcctcgagccgatcgctgttgatctttgcccgtccttcggcacggtttgccagttcctccgcctcggatttataccgtacgacgtccgtctcgagacgtgacacttgtttcgacgagacgaggtgcttgttcttgagcgcgagcatttccttttcttgaccagcctgagcgcgggcaagtgacgatattagcacgggaacgggtacgtctgccagacaagcgactcacgagttgcgacctcagatcgtcttcgactttgcgagacttgtccaatgccacgcgctgagcctcgagcgtcttggtgatggcttgttgttgatccagaagcgcggcggattttcggcactcggcaaagtacttgtgttccgccttggctttctaagagcggcaatgagagctcggttagctagctgtacaagtgtcgacttgggcacatcgcatcccactcaccaccgtcatggcctccatggcctgattctccagcgacttgagatcgtacacctttttcgtcgccgtccgctccatctgctcgtaggctttcgaaaggttctcgacctcgctatagagtgtcattgtggcctgcaaacgactgacatgagtgcttgggcgcggaaaacaacacgtcgccagaacccaccgcctctcgttcctccagcataccggccaatctatcgatctccttgctcttggccgccacctgctcaagcaacgccgaattgggtccattcttggcggccgcctcgcgttcttgatacattcgcttgtacttttccgcctcttccctcgcccgaccctcggcgcgcatcagaccggtcatgttgggtgtatcccgatcgcgcatgtaactcttgatctgctcttgtagcgccttttctcggtcacctgcctcgctacgagacaagacgtttggcataagagtccgatttttgcgaatcgggatgccggacagccgactcacgtaatcttgttctccagtgaccgcacgtaatccaactctggtccgctcttttccaacaagaacccgagatagctttgctcccccgcctcggcggcacttcggctttgcaaccgtttcaactcggattgcacggccttgagtcgttcctgcggatcgtctgggtgtgagcccgatgtttgtactggtctcacgacttggcaccgcactgacctcggaggaagcgaccatctcgtccgtctctttgatgctgttaaagacgacctgcttttcccccttcaacatgtcgttttcttcccgaatggcatcccgttgacctcgcaacctggcgatatccgcgtctttggcccgtatgagtcggtctaacgattcgaatttctgattatacgagtactatgtcgtcaaagccgagtcgaagtcagcaagcagcgtctcgtaccgtgctcaaccgagccgccgccgtgaccttacctccatggcagccttgaacccctcttgattcccaatcaactcgtccgccctcctctcggccacctcgcccaaccttttggcctcctcggcgtccgtcttttggccctcgaattcggccttgagggtcttgaatacggcactggcggtaacggcgtcttcggtcggattccaagcgacctctttcaggaaatccatctcggactgtaaccgcgtcttttcctcgctcagacggtcgatctcgacgtctttcgatcgaagccgggtcaagaggttttcatgatcattggcggcggtcaagatctggccattggtttcggcgtgatgattgccgttggtctgtcgtcgtcgtcatcgtcatcgtcgaacgcatcagcatgcgcaacgctcgaccgaggcgcatcgcgcagactcacccccgctatccgatcctccatcgcagccttgtctccttcctctttcaacaacctctgcccctcgccggaagtctcaccggaagcgacactccgcccgggaacccccgacttgtcctcctgcttgacctcgccttgtcccgttcggtcgccctcgccgctcgtctctcccctctggacccgctcatactcgagcttccatcgatcacacttgtgcttgacgctctcgagctcgagcacgaccgattcgtacttgtccaacaactcgtccctctccacgcgtagagagtcgagtgccgactgcaaggtgacgctgacggaaaagttgacgagggccgaggatgacgatgacgacgacgatgatgatgatgacgaggggaacaagcgggagaggagggataggaggggtacgagccgggagtcgagttgagcttcaagcgttgggtccttgagcgactcgatgaggggcgctaggagggtccgggaatagctcatcagtccgggcctttcgatgtgcgaacgatcacaaaagtgcgatcatgaaggctcacgtaattgtgtatcatgatccatcccttccttgcccctcgctgcgtcttctagcaacttcatgacctgtacgaccacgagacttggaggatcaacatcgacgctcgacgttcgatctcctctgacggtctcctccccgaggatcaccgcaccgcaccgcacccgcactcacatccgcccatacgcgctcaacgacgacgacgccgtctttcaaccccttcaactgtagctccaactccctgacccgtcgttgcgtgcgaaacgtccgtcgtttcgaggagagtagggagaggtagatggattctttcctgtattgctgtggtcaaaccgaggtcgacgtgatacgggtacgcgggggtcagccgggcgtggtgggacgactcatcacgacgacgacgacgacccagacgacgcagacgatggtcatgggtcgaccgatggacgtgccgggaggggactcacttccaggttagatggatccccgacgtattccggctcacgctcttcttcctcctcatcctcacgcatactataactccgggtcctatcacccctccccgccgaccccgatccagaccccgagcccgaacccgacgctccgcctgtcaacgaagctcgaccatcctgagcatgatccactttgacccgcttggtcggtcgggaagaactcgtcccgggctgcgcggacgaggaggatgaacccggccggttgatatgctgtgcaaagaccgagttcgagttcgagttcgacgccggggtcgatccctgttggaccgagtggggaccgagcggcgatgagctgtggctcatgtgttaccgaggggtcgatcgatatgcgatcagtggggtcgtttgctgaaaaggcgcagagagaaagggagagagagacgaggactggtttcctcggatgatggaaatagacgatagatgtgggatgtatgggggtagatgctggtcgtgttgggtcaaggggtaggaagcatctatctttcttctatctagaggatctggcggggcgcgggaagacgctcgaacgcggcggcgtgattgacggcgacgaatgtcatgcacaaaggttcgcgagtgacactgcagatcaaatagcggtggtggtcagtagatgatgtcctgttgtcgtgatatttcggtaacatgccgtggtcactgattgactgactgtccatcgcaacgggatttgatgatgagagcgggggggaacaaggggaagagacagccctaacccctaacccctaacccctaagttggcctgctcctccgcgtagggatgttcgtctgtttcatgctttatccctttgtccgttgatggaatactttctacaaggcaggctcggccgagatgacgaggcgatctgactcgtcaggattgaaacccgctcgacgcagtctgtgtcctcatacgttgatcacgagagtcgcgacgacacaagaaaagcagagtccagctaaacgtatgtagatcggctatttacttctaccacagctatgaatcgtcgttgcccaaaaaggaggcagaaagaaacaacgtatcatatgaatataatgggggaagaggtatctcatggcgctaaaatgcgtaacgagagatcggagcgtctctttacgaacggccctccttgtcatcgggatacgcccgagcctcctgatccttgataggcttgtcctcctcgttacccttgcccatcatgacgtcaacgagcttcttgacagtggcctcgtcggcaagatcgggaacgtccttgccggcgccgatagcagcgagctgcatgatggcgagaccagtcgagacgcggccgtcacccttgttctctcgagcttgggtgattttgccggacaagatatcacggcagaagtatggctcggcgcacagaggacgagcgagtccgatcactgtaaggaaagcaagcggtaagtatatttagtgccagacatcaagtgcgctagcgggaatgcggcattgacgcactggtagtagcgccctccgagacagccttcgacatggcggaagcgctctgcaacagatcgagattcggttaaggcgcttgcaaaaaacgatcggactagctttccagagggcaacactcactcggaatcctccggtggtacacaaaacggcgtttttcaacatgggcttgaccttttcagcaaactcgatgaagaaggcttctctcgccttggtgctctccttcttgtgttcgaaagccatcgactcgtatgaacctccgctcaactcgatcaagtcaagaccggcttcatcgagctgctgagcgacggttcgggactcctcttcggtcaagccaccatcggcgaaatcggccgagttctgtcgatcgcaatgaaatgctactcagcgaaagtggaccacagaccgcaggatgatctcggacgtaccatcttgatcgaaatgaggaacttgctcgtatcgactcgcttcttgatctcctcgataaccctgaagacgatcctcgacttgttctcgagagatcctccatacttgtcggttcgcttgttcactcggctggagaggaattgagaaagcaagtatccatgggcggcgtctacgggtcagaaccgagatatggggtaagacatcgagctggatgtttgcgcttcgacgagctcactgcgcgactcacgcaactggcaaccgtccgcaccagccttgtacaaagcctcggcaccgaaagcccatcggtcgatgagatcctcaatctcatcttcacgtagagggcgaggcttgccgaattccataccacccatcggaggacactggatgtcagatgccgaaacgggggtgtcgacgacctcgttggagacctgtcgtcctccgtgggtgagctgaccaattactaaagacccatgagccttggacgcagcgataacgggtttcaggttttcaatagcatcccaggtctgcaatcgcgatcaatattcggtaagcaactatatccgaattcgaaataaaggcgagcgtgacccacattgctcttgtcgatgatcatgtttttggcagcttcgagaccttctcgctcgatgggaatgtttctacggggcgcaacgaattggtcagaaaattacgaggccgacgacgagggttcgactcacccaagaacgataataccaatctcgccctctccccaaaccttgtacagcctctcgtactcatcggtcgtcttgcctcgggcttcgaggtcgttcttgtcgtaggtgcagagacgctcggtcatggcactctgtcgtatccaattggccaatataagcacatcgatcgagtgtcgcgcgggacggcggacttgccttgagaaacacgttgggagccttcattccattgcggaaggtaacgggctttccgagtacactgacgtcgacagtcatttttgtgccaagtctatctgttctatgtggttttcgtgaaatgggtatagggggtgattcctcggaaaatgctaaatggatcaaacgagtcgtatgcgtggtttacgtgaggtcgtaattctcgggcaaagtgggcgggcccctgaacgaaaatgtccgatcaattatatacgtttccgagaagtggaggcgagacaggcggctttcaccggtaatcgagcgttgattgataatcttcgatcgaattgataatcttcgatcgatgacgtgagcggctcatcccacgaggataacgctgaaattgctaccgagagctccgcgcgatggtgaagcgggtgctgacaaatcgaggcgacgcgggaataacgttcactctcgtctggatcgcctaaacttgcctgagccataaacgcttgtggaccgcggatagcaggcttgtcttgacaatctcgcacagtcgcgcataatctcgactcagaccgcgcgagattcgaaaccgttcctttcgcgaaatcggtttcagctcaatgcacctcgctggcagatacaccctgtcacagcgctagctggcactggcgagtgctcatcgtcaatctcgataaacggcaatgacaaggcaccaagccctcatcacaggatggatgatgaacaagaagagccggccttcgatcgcggaatagcatgtgagaggctcggtctggacgagatatagacgcacagccatcaagcgaattgtagccatgtgttaacggcctcgggggtaatgtcatgtgcatcgcttcgttcgagtgctcatatacataaaaaaagaccacggtcgtgacgggtcctgctcatatcaactttgctagaccctaacgtctactccgcccgatcggaatcatatgctcaaccgggggccactggccctgactaacccctaaccccacgagaccttcacggaggctcagcgacaagtctcgagaactttgtattgctaccagtggggcttctcatccgccagaatagctatcattctgcgttattgactacacgatcaagtagctcatgttgcggcagggccaagaacagagtgcgcgaacacccgtgttcaggttccgagggatttgacacagggaacccggccaaaagcttgaagaccgctcgacatcaacgtgttacctgaatgagacctggactaaaatcgtgtgaagacgaaatgcacttccctagagctcatcgtcccgttgctctgggcaagctggccgaacgttggtggtcgaacgcctagcgatccgtcgccgcgatttgtagatttggctcgatcttcgttcagctaccgctttccgtgacgatcgggaaacgcggaacagatgggcagaggccggtaataccgatgtacaagcgtatctagtgagggatgggcatatttgctgaaaattgtagtcatgggtacgtcgcgatatccctgacaaagtcgtgcatgaagaagcttaattgagtcactcttgaggcgatcaaaaacagcatgccaacgagtggtggtgtctcctggcagtcaacggaactttactattgccttagaacgcaaagtacatgctcgaatgtacgaaatcagaaccccgacgggtgccctaccctctgcaggcaaagctgaaagaacatgtcagatcgaggaccgtggacaggcaggcggatggctaagccctttaccccagcaaagtggaaccttgccagctcaagcgttgggccgagtgagcccacagctaagcgttcacaaacgaccgaagggatcttcgatgatgaccggtcgttggactgtccaccacaatagcaccacgcaaatttcaagcagattattttcgtttgaccactgatcatgcgatcctttcacaatcccactttgcggatgtcactaatagtggaacaggcacccgcaccttcaccaaaaagatccgtttgcaatcgacgagcgttgaagccagaggaaggcctgaaaggcttggagcgcgttgtcccgccagtcacctctagttgaattcgaaaacgactttgccaactttccgttcgttgaataagcggtaatactggaggcggtacgaacaggtggataagtcgcggaaggcttgagcccgaacatcgccacgatgaatcgcccactaacctcgggagcctcctcgatggacactttcttctggacgaactcgtccaacaactcgggcgtctcggtgccaatcttttgcagaagagacaatgcctccggaaacatggctctgacatggcatcggccaaagcagaatttgaggtttttgttgtaggcgacatctcctcccatggtcagggccgcggaatgtaccccacatgacgacactgtgcctccgatgcgcacaagctcgatcgccagtgtatgggccgccgggtttccaacgacttcgagaaccacgtctggaccgtgaccatcggtatgtgacctgagagatgcctcgtaagatccattctcggactcgagcggaacagcgccgtatttgcgagccatttctgcgataagcaccatggaatgaggacgaatcgcgatagaagcggtccaagactgcgctcacccattcgttcaggtacaggatcgactgcaaacacctggctgaatctcgcctttgcggccatgattgcctgccgcgcgccagtcgatgagtcaccaaggtaggttcgttataatgttgtagtcgtttccctagactcacacaaagtcccaccggcccgcagcctatcacgagcgcgctcgtttgtccctgcctttctgcctcggccagcatgtcccacgcgtttttcaccacaaagcagccggtagggaatatgtctggagtatgcgtagagcgaaatggaccgatgggctcagcgtaatgttcggcagcgaattcgagctcgacatacctgccatcaggatgaggtgtccgtcctccattccttgtggtgcttcaaataatgtgctctgggccaagggcactcgaacatatccggcctgggcaccctcgagcttagggcatccgatcagagatccctttgtgcagcgtccggtcatgtttcttgtgcagaaccaacactccccacaagaggtggtgaaggggcacaccactcgcagaccctcgacgaggtcgatttgagggtccgccgagggcgattcaggcagttcaccgaccgagtgaatgaacccggtaaactcatgaccctggttgagaggttgttaccctgagcggacgcgcataggaccaacatcgaaagagagttctactgaccattgtgaatcccgtagaagtaaaactggaagcttcggctcggtaattgtgaagatcgcttccgctgttttgtgatgatcagacggatgtcctgagcagagatggtcccgtgtcgcacgtaccacaatccgctagatgtcactctcacgaccacctcaccgggacctggagtgggaatatccttgtcgacgacttcgacatgattggggccgcggtaaacgaccgccttcatcttgttcgtggtgttgctcgtcatggtgatgagccgtatgatatctagatgcgattcgaggcagaatgaggttcgtatcgttgcagtaagatcgtcgatagtgtcgatgtgaaagtgatagcgatatcgagccatgtcgaaggcatcgagctggcagtcaaccggcaatcggactttagccgaagccggaccggcgatgcgatgtcgatgtccaggcaaaccacgtcatttcgaaatcgcttcggccgacataaattgatagcaacagcgcggaatgcgcgctgaagcggaagcgaatacccgaagcgagatcgaagcgggacactaatgcgaccgcaccaagcccgaagtcgtgggcctgggaatgaagccgaattggcgcacccggctcgacgtggtctaggttcgaccgctttctcacgccgacacgattcactgcggttctcgatcgtcccctttgaggatcggccttcacttcaccacgaccttgatatgtgctcaacgatctccgagatgctttttgcttcgcattcggctcgcctgggccccgaggatcagacatttcgaatcaacgcgaaggaccattcagtcggcacagtatgttcgcagccacttgctggagttctggttcgctacgactacacgctgacggccgctcgaaccattccttccagccatacggcctggtcttgcgcgccgattataatgcacggcttgcctgtgcagagcgacacgaggtaccaaggctagattacaccgaggtcacggctctgatcgccttgaccccggaagcagcaacgaatgtagcacatgaaaatctggcgacgggaccatactagggtgcaacacggctgtgatgcaatgggactttgcagccgggtaccgggcaccatcaaggtacacacgtttgtgccatcatttggccagacctggttggctatggtcccggtggctagatatcaaagattggctgtgatagatacccttaccaacttctcgctggatggacggcgttgtcctctagaatgccagaaggggactgcgcgacacgcttccgtggatctcggttgtttccgcttagcacttcaatcagtctgctctcatcgtagcaaaccgttgaagactcgggaccacggtcactaaagcctaaactcgcgggacatttcgaccccatcgcttcccactaacgaaatctctagagaaggacacgaaaacgatgcaccatgtcaagtatcggtcgctgagggctagtcagttgccggttttctgatagccgaatccaatcagctgattacaaactcacacagggcattatcgtacgtactcatgtgtagcctggagagcgccacgtcgacccaagggaagctctcgtcggtttgggctcgccgccgctcgtcaattttcggcccaagtcgccccatcaagtgatacgcttcaaaaaatggttctgtaacccccagaatcgacaaggccactccgaactagcaatgactgcctcgcgtccaggcttcgacagcgaagttcagtccagcacagtcaacagaacgctccggcagaaccggctttgtcctcggttgcaaaggacaggcacgacaagcaagatctaaagacccgcagcagaatttctgctagatgaaaactccaggactgattagaagtacctactcctgcgcccaaacttgccaacgtcgcgcagagatcgagcaatatggtgtgagtactgaaatcgctaagtcgtgtatcactgcttctataactgcctcaccatgaagagacccaatcgaataaacgctagcacgatgcttgcgatcgagctatagtgcaagtatagaaaaatggtgccattcgctacctacatccccgctttgatgtcgcgtaatgtgagtgtgcgtctcggatacttgccttcgaagtcctacttgtccttgatatttaccgtattggtgtcggtgttggtcaaatagcacgttcttgctcaaaacaccatgatttcatatgtttcctcgattggcgctacttaaatattgcagattctgtcaccgacgtgtttttggacggctttcatgcacgatatattctgattcggtttgccttcatatgactgtgtggggtttacagcgatacgtagtctgaactaacatagacgctagtcgacgtcttgtctggcgccctcctctcgacggcagggttgccccttttgaacgtgatgcgagtgcacgctgcgccgatggctccctccaaggttggggcagtatataaggccaaagaagctgtcgcccagagaaagctagcgatggtcgaaatatttgcctttaagtcggatgctgcagtagaacaaatatcccccagcaactttgacaaatcagatggtctgctcaggttccactcgtgaagactcgctacaacccctaacccttggcagtgatgcagatcgggatgagtcgaagcaaatgtgtcaaggctttaagagtgacgggatcggcgctgtctttaagtatgagccagtagatataaccctcgattagctataagatgacataaaaaatatagtgcaaagtccttctgctgatcgagacagcaaaagcatgataatggcttcgtaattgtaggcctgtatcgaagaacgaaaagggaagcttcggtacattggcaggcgagtcgacgagtgacatagctcaagaatggattgaaaacgactcactgaagattgcaacaaccaactcgctagatatgaagctataggaatacatcatgtactggcgcctgccactcgtctttgaacggcctccactttgatgacgaaacggccagctacacagtcatatctacatgtatctcaatctacatttcgatttcaagataccagaatgatatacaactattctcagaccaagcacaatggctccccactcagccctcgtgaaaggggaaagattgtggcacatgttcttgacggaaaaacctacaaagagatagctcagaagtacagcatagccaagggtactgtcgcatacacgatgcaaagagagaggcttcacaacgcacagaagtcgcttccaactgggaggagaccccacaagatgacagagagatccaagcgatggtttgccagggagattgagctgttccccagtccccctgggactattttgcaaaggctctggacgtctcagagagcactgtgaggagagcagctgcctcgatgggcctccacaaaaggatctgcaaaaagaagccctttctctctgagaagttacaagcagctaggcgaacttgggctgcagcaaatgtagaccaggactggagaagagtggtcttcacagacgaatgtgccattcagataggcaaagacatcaataggtactataccattcgtaggccagggcaggaataccaggccaaacaccttcaaccaacctttagatctggtcgaacctcattgatggtatggggagctatagcatatgggaagaagtggccactagttcgtcttcctctctctcctcagtaggttgcagccgatggcctgggcaagggcaagggcctcaactcgtctagatacaccaagtatgtcctagaggggcccttgaagcgatgtgtacgagctcaacagagagctagatggagggatgtgttggtactagaggatggagcaccttgccattcgtctaaagtcacctgtgctgcttgtgagaagctgagaataacttcaatcgatcacccatccaattctcctgacctaaatgcgattgagaacatgtggcaccagctcaaactcaagctggggcgcatgaatcgaaggtcaacaagtctagatgagctgtggggacagataccacaggcttgggacgaacttgacattggaatggtcaacagattggtcgacagtatggatgaaaggagacaacatattgctgcagctagggggtcctatacaaggttctgaggagtgagactaccttgcaatcaacgagaagactactttgtacctgcttgtgtaacagaaccaatgtacatcaaagattgagccctctggaacgaagtgtatgacctgaaacatcaatataaataaggtttcgaaagggctgtccaaagacgagtggcaacgacgagtagaaacggtcttgcagttgtcgaacattctcttaaaatgtagcagtgacgtgacgtactgtacaaatctcccatcatgtcaggggtgtaaatttagcggagcagttctttttgctgtcgtaaatgtgtgatgataagcatcggagctattgatcaccaagcatgggaatcacagacgtgctgcaattgcctgacctttcgcgccactcaagcccccatgatagctgcacattacttacctgaccatgtctctacttgatggttgaaggtcgccgcccgatcccgtctgcgcatctcacaagaagactttcattgaaacttccctgagctcttctgtagaagaggcttgatagtggttctcccatctaactttatcaggagcctggcctgtcgtccgttactattccgttcgtacgattctcgaccatcttttggccctgcatgatgaatgttttcttatcacgaaggaaagaagcgtcattctatctacctcattcacattctgaagcatcagagatgacatgaaaaatgggcagacgtacaggacttatcatgatctactgctgatcttgcgctctgctcactccccgtttttttgtgtttgttgttgataagatgactggctgacaacacaagtcctcgtttggattttttttctatcctcaccaatagaggtacttccaaacccatcactgtgatcaggtgatcaggttgtggtactgtactcatgtgcgctatagcacagtgctctacataatatccgacggggatggctgtacccctatttgcgttgtgtccgtccaatgactagctcgtacatgatattgattgaccagctactcttgcttgtgacgattgtactggtttgcattgagattatttcttgtggtcccactacttccggcaattgagacatctctttcagtcagtgcttttgctctttctatccaatcaggaatcgcctcctcccacaacctgtgtcacgtgactcgacatcgacgcgcctcgcccctactctcgcctctactctagataatcaccttactatcagctatactcccatagactactttacatctgtgttccctagctaattactagggatcacaggtgagccataacttgtagtagtaatgatgatagacgagctaattactaaggatcacagataacttcagcaagaaagcaagcccggcttcacaaacacttagcatgttcccatcccataaacctgctagttgtaggctacttgacaacgtcgcctttccgtacagtgcgtgttggatccatcattgtattatagccctatagattggaatcctattacaaaccaactcagtcagctgacataaagagttggtatcggcatggttgttatttttggtgttggtataggtattagtattgtcaacatgattagacttgggaatcactttacggacaaaataaaattaatgtatatagctaacaattttccagctacatctcccttatgtatttctttctccttcctcaagaaaaattatcacaagttaccaccataactatacgccttacatcactattattcagtacacattatattgcaacattcagcaactgtgtccttgtcaattacttcacacctagacataaatggttagtcaaacaactctcattgctggcttcatcctgcctttgcatgtttcactactgacttctggtccttggtgagtacaggtacagtgtcacagcggcgcggatggcttatgtccgatatgccccgcgcggaggcgacgcgtacggttctcgaagttatcgtactatttcgtacttaaagagacgtctgctttgtattatggtagtgttgaagacgcttgagcgaggtttaggagctcaagcgtcgatatttcatctcttccttaccactactttacaacagcttaggtcacctcacttgacgtctagcctagtattgctactgaccccaattacgtacgaacacgtaatcacgatatccatcccgactcgcggctagacctcccgtgacatacagttggccagaaacctctgtaacagttctttgcaaagagggaggagctacatggtcttgtcccaactattggtcggcttagagtgcaggtttcaaactggatctctcagggggagtacttggtagtatccttcatttgcaatacttcttttcccctagaatgattacgagcgaacgccacaaaaagatgttcagccatccatgttatatcacagacgtaactcaaatactgagaccagtggcctcgttcaggatcagctttgcaatatggtaagactcacactagaaccaagtacatgcttgatacctgcatgggtggtgagattatcaggagaggtctgcaagcaattccgctcagaaatgaggtgatgtggtaagggtagatatggaaccgtttctgtggatgacctccaagaattgctctgatcgacggtgctggggcagacacaatggcgtccggtaggccctgtgtctatgtgactatcatcacaacagacggagcgattcagccaaactgacttgattctgtcaaccaagagatgcgagggatgaagtatgtatcacgcgtcagcaagtacttatgcgtatgaacagcattacagatcatagaatggggtcgagcattatagattgtgtcacctgcccctgcccttgatctcatcaagtttttttggttgagtctgccagggatttattcgaggttcaagggtattagggcgatctgatgttcagtaatcgtgcctcgatagtcgctcgcctgagtgagccgtccgcgtcgctactaacacgtatcactgtagattcacatgaaacacgtattctccagacgaccacaggaaccgtaatttctcctgagttcctacctattgggaaccatgagtttaccaggggttagagagaaaagatgctcgaaagctgaatggcattgctcttgtttgtgatcaattcctgagaatgaacaatctgtgcactaacgcggctctaacgccgttcaccttagacatattatggtacaaggcatggagtgggtggttgtttggcccaggtctgcccgacgagccatttgagtctcgtggcacgggttgtcacttaagtgagacgtcaaagattcacgttcaaaactgctcttgacgcaagctcatatgagaccgtagtttcagtttggtcttcgtgatgagtacatacgcttggaggttctaattgtcggaatccgcgcagtcttcgattcgacttctcagtctagcacaatgttatgcgggaggagaagacattggttgtgcactgcagagaaacaccagcaaatagtgtcttgcagtgttgtaagttcgagctgtacgttcggccacaagcggcgttataatggtcgacaagcgtgagcggagatgcgccgtacgtttatcgtctagacataccaaccgtcaaaacttctcttattgaggtatattgaagattttggacctgatactgtatagcatcaatatacatcccgtagcagacacactcttgttacacatctacccatagaaggcccttcattacttgtagcctatcagcatgtcagtgtttaagattgccctccccccggtattgcttcgcttgctaaagctgatgaaccaagacctggctggcacccgactgtcattttatcaagccagataaaagtacaaaggactcatagtgtgcaatgtgaaagactgatactcatgtggtgctgatatatcggtccccttgccaacagatttgaatacatacacaaccttgggaagagaaaggaaggttattgagcaagctgactggtcattccggccatcctaccgttgtgggtgcaccctcactctcacactttcattcaagtatttatgactccgagccccgtttatggcattgcgtgcaatcatagtaaacgctgagcatggcaccccaatggaaaccggcctgcttcatcacaacactgggtctagttatcaacatgtattgatttggactaacagacagccatttgattaatgtgatagaacgaggtctgtttcagctgtgggactgtatggctttgcagtgtcgtataaggaagttccaatgtagaagcaggcagaatagcagtagaggcagggatcagtcaatgagcatagctagaagtcatacctgttgcatctatgtatactgtggtgcattgtactattacaattacactttcacatagacttcatccacatcagaaaacgactcccgtcgcatcgcttacagctttgccctttgattctcttataatcaaggctggggtctgctttcgattatgtcgtggctatcctcgacgactatatattcccggaccccctactgaagacaacgtagtctttgcaatggcacgttaacacgtcaaacctcctctcatatttcgcctggagaaggcggcttccacctgacaagtaatgcaccactagagtcttttccatgcatctctacagcccggacatcctatttgcaaggtcgcagatgccataactattcatttgcctgtatctcatctgtcttactatcttcacgtgacgcgcgtaaagcttctcttccacccactacatcagtatgactagacttcattctatagacctatatctatagtgacagctgttgttactagcaaaccacacctgctcgtgatttgctggtaacaacaggtgcgtctatatttgtactcctatgactataaaacagtcctatgactataaaacaccggtggtgatttgctggtaacaacaactatctgcctgtcgttcatcacactggactagatgctttggataagggtgtcaggatacagagctcaacatcttagttcagccccagattgtaatacagctcagtaacaaacacgaccggtcgccatgacccgccttgctcaaggtcgtcgcttcgctatggatgctttgcatcccttggccaggtgcgcgatttgacatacggacggatctgccacattgcaggtgaatcggacctttatcgattaggatagaagccttcatctagatgtcttgatcacagtactccttgtgcagttatgcaggctgggattaaaacgatacgacgcacgggaaaagatctccgcccgcaaatgcgagttgtccctaactggataccgcttgttggagtagttatttacagattaaaagactggacccgtctcactagctgcagcgcttcaccagtggggctaggagttaatcacctaattcgaatttatgctatgatgttgagcaatgtctcatcaagataacttgtcgatccgcattctttttagtagccctaagaattagtgcaagatgattgctgttccgatcatgtttgatcatgtttgagctcacttatactcactttcaaatacgcagcttgtgaaactaaggcattcatgccggagactgaagtgatgctaattgaggtgcggattcacatgtggcctccactctactgtttcttaggggaccacagccataaaggacactgggatcagacggtttatcccgtttgtgaagggatttcccgaattgccattcgctgcgcttgaacaaaagtttcgctgctgggtatatcagatacagcatagctgagagtggacaaatcgcgaagccattgacagcgtttaaatgagacactaccgacacctctttgctaaccatgacactgtatgattcgaaacagggacaatgtcaatgtgaaactgtttcctggtcttctctctcataagctcagctactccctgacattctgagctagccaaaactgcgtttccttgttcgcgatctgaacactagcttggtcttcgctcgacctcattatcatccaggcatcaaaccccaaggattgaggtatcgcttctatgtatcgctcaagaatacttgcgtaagtagacggaatggttttaggcgtttcactcgtcccaggttgtcatctttttgccttcgatcccgctgccgatgttgcgcctgagtctgttgtatatgaatgtacacgtcccgttttctctgatcgcttgggtgctatattgacgttagatcgcaagactgattttataggctttcataccaaacagcccaaacaagacagcggcacgtataaagagagcctgctgtcagaggaggaacttctcactttgagccggcttgagatatgggcagaattgccttatctttcaaggccgactgccgacacgtaaccgaccagcagcccttgaactagcagctgcccctcaccaatcaaggcagacgctaccggattgcgcctttgcactcgacatttactggacgatacaatatctgttcatccgctaccagaatttcgaatctgataccgcgacagtcacgatccagccataagttgaacactccgagcctgctgggtcactctgtagcgatgataaggcgttctacccgagatacaaggaatgacgatcagggtctcttctgttgtgaagtaacaactagatccacaaagattggttacttgctgggtctaaacactatggttggtgctgatgatgccttgttgtgaaaggatgatcaatgttgcttgcataaaagtaaagtactacatgagagagggaaaggaaatgagacccaaatggtctcctatatatacttttcaggatggtggcaaataatgactcagagctctgactcagatctgtcagtgtgaactgttcacatttgaggggttttgccattggtggcaatagtttctcatgtcttccagccaatagcagaagtgcctcagatctgccacccattggcaataatgcctcagtggcaaaaatagatcttctagcatgttccatgggtttgcctcctgtttgcttcctttgtttactttgtggttgagattgcttcctgcatccatgagccaatcatggcatgcctatttgcgacatcttcgggctgttttcagcgatgaagttgagttctgctcagtgtatagtaatgatcagagcaaaactgtatgaagtcataattattatgcggagcccggtatttgcttagcatgtatctcgccgaaggcgcgatgatttttctgtcataaggctgtttatgaaaggtatgctggcgtttgaccgctgtttcgtcctgtctgtatactaaaattgacgctacaatcgggctgtcgtacatcattgaagcataacgtgaaaattctgtcgctgcggtcggtgtttaatgcgaaagaaatgctcatggtgaaaagcgaagctgtgctctacccgtatataggcttgatgggcgattttatcagaagagtttgactggtaaaatcagtgagcagttgtgggctgatcaacgaggtacctcagctcccatgcgacagcttcgtcctcttgtagtaatttacgtcgtcttgcatctattgaacatgcctttaaccggcatacacggcgtggaacgttacccaccacagcatgtatcatattagaaggggacccatactgaacatgaaccttcgtcctctagcgaggtgaatatgggctcacagtaccctgctctcccaaagtggtctgggcctgctgtcaagtcttaggtatgtccactttcggattcataatgatcgttgtatagcgcacggcgcaagactctattagacctccatacaatatgcacatagctgctttgttcatttctagctttttataaaattggtcattggagacaagtgactttcaaagcctatcttttacgccgccgccccttctttgatattcctggccgtgatcctgctatcagttgtagacacgatgactgtatgtatactgttgaacaacagtaattgcccctcctatctcccttcatctatagctccgttttatgtgaagagatacagcgattcacttcaagccggtcgccaagatgtgtgtgtcaatgtaattctaatatgatatccactgttagttgaggcgtgacactggcgtttgaatatgtgggtttcagatgcagcgaagttgttagtcaggccccttcatgagatgaaaccatggctacctcccgaaccttcatacgggactgctgttccagaaataacaccaagctttcaagactagactttggctaatctgcttgcgctccgtccatgcaggatttgcacctcaagattgctacctgaaattgtgaaatggatcaaaagacaggctactgcgtcagtctacacatatgaagagtcctttccaagcagtgtatgagttacaaagatctctgtgaggaccctatgggcgcgttctcctgtggagggtttgtgaagcaacccaaaggagctatctgggtgcgatgcgagctggacagtggtcaaaacgacagatgaagtaccccactctaggcccccaagcagaagaaaggattttctggaggtgctagctaggtgtgtagcttcagcaaagagtgttttaagtcccgtccaacgcccagaccagtctacaacaggtctcagctcaaagtttgggtgcctagctgatcttccgctcctttactggcttggacttgtgcgtgattggtcaatcagcagtctttatgaagaagagaatctcaatgaagaaacttggatctcaagcggccagtagggcaaggctaattgcttacctgagatatataagcataactagctacctggctacctgcaactggctcaaccactagcaaatgcattggacactagcaaccagatcaactatctcacgaccggcttagcctgtcgaatggtttagccatttgtgatttgtcacaaaaggcggaatcattgataatcattgatggcagagccgttgtaggaaggctgagccattgctggaggtgagaaccattgtcaaagccatgtccaagactctatattttcctttcataaagtaagtatcacctctagtctcagcttgttgggtcgccgcgctgattgtatccggatgttccgtcgcagctcacctgtcagcgactaacaagatatcagggctggttctgagaccaaggtgtcaaggacaacaggtctttcctatcagacccgccacgtgatcacagtgttccacatttcgcaatgctgttgcggatgctgttatgtctatagacagtgagatcctcaataacagaagtcgaacatctcactacttgagggccttcgagcagaaaggggaaagggagttggcagccaggccttgactaggtgtggatttcggcgctgcttgagggtgaatttaccatgattatagtcaaatagagtccagtcctgtagtgatgatcaggaactcagactctagggagagactgtacaggtatgctatcccgctccaagcagtatactgatgagcagctatcagtacaaggcaacgaaatttaaaggtacttacgtaaagtacatgctggacaatctgtatcgtaatgcgcgactagcatggtaggtcatggcttgtatatagccgacttttctacactgaatccatttttggtctctcgtctagagttgtgaaacaactgccctgccaaatctgtgtaggtatatgagatatccctcttctatgttctagacattcgaagtcaagaaatctcaacaaggacttctctatcaacacatgtggcaagacaatcctgccttgtagctggcgaatgataattctgaaatatcgcatgtgttggaagggtgcatagaggtaaacgaagcctgatagcggaaatattctcaacaatgttgccttgcaccctaaagatctcaactttggtgaattatgggatttttctctgggaatcttgtgttattggcactgttcacttctgctctgtgagggcacaaattacaatcagtcatcatcccattggcttaagtaatgacgcttgccgaagactggcagtctggagttgtcaatataaatctgtatccatccggcaagtcttgtgaacagatccattaatgatctcctttacgacattcattgccgtacagcactgtcactgtacctttttgccttcagtaagcaatttctttcaaaggcagaacaacagcctaaagtaagaaaaccaagatcaatgtagcattgggccaatagaaatgttgtagatgtgggcctatgctgtgtgtcaggttcgaagtctgcctggtgagttgggcaacaattgctggaagtcagagtttggcaaggcgatgtggcagccctgtaaatgctttgcagaagataccagaatgcttacatagtgcagtaatggtgctggatcatgcagtgttaggaatgggatcacatgcataaatcgccaaatgcttgcctaaccattgagctatggttaactcccatattccatgttgaggttgcacatgcatgtcttgtcgaagggtatgtcaatatccattgatttggtctcgccatccgtcgtgacaaagcaaggtgcattatacacctgatctgtgggaaggagattcgtagaatcgaagctgacgtgaaacagacaaacagggtatgtaggtgagattgtttgatattcatgagatgtaagcagcaattggagatctggctggcggctggaagaactaacccctaaaaatgagccggcccaggtttgtgacagtaacggcgtggggccgtataatctagcagcgtctgttaatgcactgttgtatcaatatctataccttaaattccagcagagcggccaatgtaatttacgataccgacagcatatcttacattcttgcatgctacccaccgcactttctgttgcaagatggctgtgccctgatgctggcttcagcaccttgtcaacagcctgataataccggaagggctgcagaatatgccctgccttgatcgtgctcctgaacagcctgggcagacacgtctcgtaaaggttcgagtatccagacaagacccttgacagcggagaatcttccggtgtgccgattcatagcgcgtcattacaccttctgattcaatgctgctgcctgttggaaaatttatacaactccttcaattgctaagcatgttgtctatcagaaataagggaatttgtctgactttgctcaagagtaacatggaacgtgcaatccgacagtggtgagagactcttcgaagcctgttcaacgccatccgatcaatgctaacacgcgccctgttccatatattgtgtttgggctgagcctgatacacaactaagtaactctttgtcttagtgatacgaaacagaaaagatagatgaaggagatatatatcgaaccgactgtcaacacctcagttagcagtacgtcaagttatctaaatttttaatgataatcataggacccgcagcagatccccatcattgataaatatgttgagaagaaacaactagatccacaaagattggttacttgctgggtctaggcactatggatggtgctgatgatgccttgttgtgaaaggatgatcaatgttgcttgcataaaagtaaagtagtacagggtagagggaaaagaaatgaggcccagatggtctcctatatatactactctgatgagcatttcctcctagtgtccgcccagtgtacttgcgactcagacgcataagtgcgactccagtcgcaaatgagttactgacgtacaactccagtcgcataagcgtgactccaatcacagatgtgtgactccagtcacaacatgtgatcctagtcatatgttgaccctttgtgcttgagattgcaccctgagcatcacctatgatgtcatagcatgccaatcttcaacaatatacggcgttgatgctacggcaacacaactatacctgcgttctctacggcaataggatgctccagtgattgccagactggtacgtctcccgatgcgtatttggcaattgtctcacagtcgccataaaatggcggatagaagttcgttgccttcaaccaacattgaaagtgagagacccgcagaaaccctggatcaaatgcatccaagtgttggctatcgaatactcagggcacttgctattgacaaggttgcatataattcaatccgctcacgtaggccccgaatccattaccacaccatagatcgctctaggcgagtagaacaattcgacaccagtactgcgatgtgtatctatgtgagcatgactcatcgaagtgcagtactgataggcctattcttttcattcatttgcaggtcatgctaattcagatgaggggagcgaataaacatttcgctcagactcagaaatcgcatatcatctcgttcagcagcgtgcagataggagacatctcactcctgcgtagagacctcaccctcttttccatagtagcatatctggtgtcctaaccaatgatatagtgctgcccccagagacgtccgaaatgtcacattcttgcgactcaggtagatcgtactccatataaaatggtcttcgggtcaattttgaaagagtcagagattcctttcgcttcagaaatgatacttataggtcctttggcgtgactgtatggctgaatgggtttttgaaggatgttgccacaatagacgagatctatgaagtatagacctggagaaacaaagttcttgcctggtcatagagctgtagatctgtacgtctgtagatgacccccaaacactcatcgaacagaatgtgaaagttcttgtagccaatataaaatagtcaatgtgacttagccgatgtatgcttgaatgatgaacaacccagggcgcaacaaggctgtcagcttgaaatcacttactctgatccttatcttacgtcgcaaaagggtaatatgtaggtgaattatcaatcaagggctactaaacagttataaattatgaaacccaatggacagaccatctcccaacaccacggtctacataaaatcaactgtactgcaaccagactgatctaatcacaccgccatcatcctcatgggatatagcgcttctctttggcgcaaggctactacgccggaagacgttttagggcttttcactagacgacaagggggaacctcatgcgacaagcactcactagctaggtttgaaaatgatgtatcgttcgctgatttgtaccgtccgcgcctaaattaggtaaatggtggcaatggcggcactgagtgtgacgcagacaggtgagcctgttaatgcatagcctcggacgacaaatgggttccacgagacctaccgtacggagaacccttggtgtcgagccgaacactgtgccgcgactgtcatcacctctgagcgaaccctttgctgcgtttctgtgtcccatcaactctcgattcgacgaacagtgtcatagagttcatatttaaacagtacatgtggggtttcactgcgtgttcgtttcgtggagcaacaggattcgtccgaaacgactttccctttccacgtcccatctgcttgtagccttgacgacggacgactggctcccacttgtgcgtgtatcgtgtcagtatacaatctcgttgcggtaagatcctatcctcgcttcgacatgcctgagtcagttgatcctcgcactcccgttgcttgtgcgagaggaaacgattcgcttgtgactccagctcagccaagcgaccaagtagataatctcgtgaagcccaaactgacatcatatgctatgcgatcgcagacgtgacagctcaaacaatcgagctcatgccgggtggggtttgcacagaccaagggacgtaattcgcatcggtgcttaggcttgactgcaagtgcaagaaagcagcaaagttgtattgtgggcagcacggtcctgactggtcgagaaatagccagtcgaagggcaaaatccgctaggtgtgaaatgaatcgagttacagaccccaggtgtgagacgaatctctgttcagtagtcatcgttggtatcgtcgacctgactgagcggtcgatatcgaagaaccctagcaaagcgtatgtgatgtcttgtaccgaattccagtttaggcgagaccagtgggcgggagacttgcgagcttgctgataggcctcatatatgcagctagactagcctgcgatgtttcatcgacaggtctgacagtctcgacgcgaatatgttcgtattcggccacatctagaacgcccagttatggatggattcaacggtggtcgccctagcaaagctgaacattcagggtaggaaggatgacagctgagcttcagtcgtccgtactcggcccctatatcgaacttcctatgtcatcgctggtcgacccagggttccggtcagatgatgttcgatttccggggttgctcgagccgtggcgtccttgatcaaggcattatccaagacgtccaaggagcctcatcgccatacggtgggccgctttctgttcaagcatcacctatcatcctttgaggaggcggcagagtcggcctatccgaggccagagaggacggattgtgatgctatcactgaggttagatctactaacgagataaaattcgccgtcagtggcatcagacaaaggttacgcaatgtcaggagaaactggcatcacgtacgggaaggggttgcttaccagagcgcctcattcgccatcctattcacgggaacgtgtggaagccggcgatgctgggatgttaaagacgatatctgcagctggagacttagaagatggtctgacagaaagtatcgagtggtggggatcagtcaaatttacagcccataatggaatcaggtggatggatcatcgcttacgggttcgattcaggtcagtcgaggtcccgtaaagctggtatctatccgttctactgcgtcagtaggcgacgaagcgctcctgcgcgttgctgagatagactgacggacaggtagcgagtccagtcaaagaggtctcaccgtctcgacacagccttgcactcacatcagcgacatgatggggcagcttctctcgcataaaaccgctcgtcgggtctcattcattcggaatacctccagaggtctcattcgtgatcacgatgacagcataaacgtcccaaccgaggcggtgaaaggcatggtaaaagcggtcgtatgctcagtaccactagtcgtctcgatggacctggtaaacagatctcctcacgtcaacacactatatcaagcccttgcgcgcaatgttcccaccttgacgtcgttcgactcgatagtctcattccattgcagtattcccttttgcacacggccaggggggtcgagcggacctttctttgcaaaaccatcatctcggcgacgaagagatccgtatgatctccttattccgtcgaagttcgtcgtagttgaattgtgatcaccgattcaccggtctttgagattatccatcatgataggatgaagctatttgtaacaatgatatctatcagtcgatcatgtaggtgttaatgaatgtgtcaccacccgaacaccccatcaattacagaaacgtaccgggcgtcccgagccaatcgtctctactcgagcggtggtggttgtcagtgtcagttcaataccagggcgggacaatgttgacccacctgacatgttgttgttccgtcgtgaagctaccgagactggacgtggtttgatgtttgaacctgctgctactcaattagggatgttcaccgggttcagcacatcgctggcacttgaggaggccaagagagtagcttccgcagaggtggtcgggcgaggacatcacggacttgtagaatacaagtgatctccgtaatctgatggggcgtagttggcttgagatgacgcgtgtgattattcgagctcaaagcaccttatcacgtttccctcacgactgctgaagtgacgttttatcttagcgatggcttttcaaatagagttagcgggtggtctgtaacaccgcgagtttatgcaataacgatcaaacacccgccgatgtctccaaggttgcattggcctgcctcgtcgaaacacctacccgagtcaccagagccatgcgaacacctggtcgtgtagaacctcctaattgaacagacacggcgcccgaaccaagcggtttcttgccgtgtagatactggtcctatctctgccagaggcgacggactgtgacgtccgaggacctcacctcccaagagctaatgtcaaacgtgatatgataccaagatcacaaggccaacggggctgaccggatttaagcctttggcaatgcgatatcccagcggccatccaacggtatttcgacctctggttggcggcaccgaatggcagatcccgcgcggcgactcgatcggacggctatattcggccgagacgcgtctcgccttacaaaactgcactttcgcacgaaattttccgtgtgcttgcgattgtgaatccctcgagcgagcggcggcccggggttccggaagcatgtgaacgatagcgggaggagaaccgtttcacggtcactccggggggttgctaacacgtcgaccatgctattctgaggggcagtccccgtgttccctcgcctgctgcgtcatgccttttccctcgccgtcacgctggatcagtctcaatcaccgaattgtatcccgggacctgtcgataaacaaaagcttgcgcgtcgattcactgcatatttgcaattgcggagttttgatgcgcggaattgtgccgcgcggggacccactcgacgtgagatcgatcgagtaacgcggtctggggcatggccagagacagaaaaggccccgtgtggagatacgcagcggtatctcttggcattgcgtgcctgaacgcgcttgcccgcggggtatataggtaatcgacaattcgtatcgctgctcatgccagcccatcgtcgcgatggtcgctcgctcgttcgatccctaacaacccggcgcctacacggtctcatcacgtcaaacatgtcggaatatcaggaaaaagaaaaggtcaacccggtcggcgagcacatcgaatacagctcggatgtcagcctcgaagcgggttccagcgtcaatgaaaaggcgatcatcaggaagacgtgagcgagcgagtccggacttcagcggtcgccttgccaatgctgattcgccagtgcctctgtgtgacctcttgctgcagtgatctgaggatcgttccttggctatcactgctctacctgctttcgtttttggaccgatccaatatcgggaacgccaacctgttcggtctctcaaagcaattgggcctgtcaccgacgcagtactcggcatgtctcgccatctttttcgccttttacgtcattttcgaggtaccgtccaacatggtcatgaaggcatggaggtgagtcggcgaggcggcagcgctgatcgatggcaggggctgcgtgctaacaaggcccatcggtttcgttgtcacaggccatcgatgtggcttccctccatcatgttggcctggggcggtgtcatgatcggtatgggtttcgtccgaagcttcgaagggttgctcgttacccgtgtgttcttgggaatcaccgaggctggtaagtctgatgctgagtatccgtcgcggtcacaacgcagtgactcacacagggcacgcttgcaggtcttttccctggagtctccttcttcttgacccaatggtaccgacgctacgagatcaatttcaggatcgctctcttcttcagtgccgccaccgctgctggtgcctttggtggattgctcgctcgtctcatcaatgagatggacggtgtcgccggttacgaaggatgggtgcgtcgcctcttcgacatggccgataacctgccgaatcatctaacccactctcgctcatattcccgtagcgatggatctttatccttgagggtattgccaccattgtcgttgccgtcgcctcgttctggatgctgtacgactaccccgacactgccaaattcttgacggaggacgagcgcgaattcatcgtcgcgcgtctcaagctcgacaatgacggatgctcgcaggccttcaagtacaagtttgtcaaggacgccttcctcgactggaaggtctgggtggtgagtcgacgcgggaggcgtgacttgtacgatgtctcgctgatgtcagacgaaacttcagttcgcaatcatgttccagggcgccttgatgcccgtctacgcatttgccctgttctcgcctaccttgaccgccaacttgggttacactgccgccaaggctcagctcgtgagtcgaacgagtccggatctgtccaaagataaccacttatcctcgtttcctatgctgtagatgtctgtgcctgcctacgtcgttgccgctttcaccaccgtcatctcgggatatgtgtccgaccgactccagaagcgagggatcgttgccatcgtctttgccagcttgggatccatcgggttcttgatgctactcgttagcgccaacgccaatgtccagtacgccggtctcttccttgccgccgcgggggtctaccccttgatccccatcgtcgtctcttggggttccaacaattgtggaggatctctcaagaagggcgtagctaccgccatcatcgtttcgttcggtaacgccggcggtgtcatctcgtcgtttatctacccctcgaccgacaagcccaggtacaagaagggtcatgctatttgtttcgcctactgccttatcgtcgtggtctcggccatcatgatgatcttttacttgggccgacagaacaagaagaaggaggccaggaatgccgccagggatcacccttggacggccgaggagaaactcgcttacgaggacgacggagacgacgtcgagtggttcaagtacgccatttagaatgcgctgttttgtacgtcagggtcttgcggtgtgcgtgtttctgcgagggagatttggaggattttttccgtagcggccgatcaatgagccaaagagtgacgtacatcacatattgtatgacaattaagaaatgcctatgcactacgtttacttttcatcgtgctctcgagattgctgtagatgtttaacatgattggggatcggaacctagcagagagcacttcgggtgaaacgtctcgttcgaaaaagaccaagacatgtaccgcggatgatcatcatcactttcgccctagccggccgtgctcgacccgagaaacccaccgaatatcgagaagatgacgtgatgtattgagttcgggtcgatcggtcctgatcaataattcaccgagtattctacccagccaaccagccgacatgccccgatcagcgctaattgatccaagacttgtcggggactgcctagcgcctgagctcgcttcttccacctggtgtgactttcatctctagctccatatctcggtcgtttccgccgacatcatgtgtagcatgtcactaggtcaagatcaatccggggaggaatcgtcgctggattgggtctccgcggggcaagtgcatcatcggtgatcgtccggacctactaatggaggcggagtatataaagatcaaagcggaagaccgcatgaggtggtttcccttgccaagtcacgtcaactcgaccatcttcccgcaaatcaccatcaacacctcgctcatcatgttgaccactaccgctaccgctgctctcgtctctcttttgcccttgcttgcctcggcctcgcccgtagtctctcgcaacaatgacaaaaagttgacaggcctcaacggtctggcggcccgcaccaaccgttacgtggggaccgcgaccaactcgttcaaccttcagggaatctcccccgtgggaccttacaacgaggtgctagattacgaattttccggtgcgctgacggcggagaacgagggcaagtgggaggtcattcatcccgagcagaacgtctacaattttaccggcatggatatcgtcagtgttctgccaaagcagccctcgagtctcgatatgtgcagaacaggtattgaatctgtctgatcctctgatgaccagatcgtagcagaagccaagcgtatcggagctctcgttcgaggccatacctttgtttggcatcaacaggtaagtttggtcgtggccggtctgtggcagtcaggacaactgaccgagcgaacttcgaccgacctttgttgccattcagaccccatcatacgtgactaacatcactgaccccgaagagctcaaacaagctctcagaacgcatgtcgaagccgttgctggaaggtacaagaacgactgggcctaccttgatgtaatcaacgagcgtgagttttgaagatccccccctaggacagtcaagcctctcgtccttgagctgactcgcctgtgccattcctagccttgttcgagaacggaactttgagggacagcgtctggtacaacttgcttggcgaggactatctcgaatttgctgtgagtttgtaacatgtcttgagataatatctcaacgattcgagctgacgcgccacgacttgtcatgctgataccgttgcttcatcgccccgatcggcgccgtttcgcagcttcgaaccgtgcatgaagtggcgcccaaggtcaagctttgtatcaacgactacaatatcgagagcgtggccgagaagtcgatcgcctacgcccagctcgccaagaggttgttggacaagggtgcacctttgcactgtatcggtcagtcggcttattcgggtttaaaattcgacacgtcacgtgctaaagactcgttttcgacatggcgaatttttggcttgcgtattcacggccgcttcttctgcggtccattcctttctgactaaacaggattcgagtcgcactttgtcggcggtaatgctccgcaagacattgcggcttcgatgaagcagttcaccgacctcggactggaagttcccttgaccgagttggacgtgcgagtacaggtcgacgccgccgacaatgccaactcgaccggattggccgctcagtaagccacgagacagtgccaattgaccttaggctctacttaagggagctgatcttaccatctcacatcagggccaccgattactcgactgcggtcgaggcctgcgtgggaaacccgctttgtcccggtgtaacagtttgtaagtctgaagcagacgtggtggaactgcgagacgacactgatgaccatgttcgcgcgcatctagggcaattctacgaccccatctcatggattcccggcgtcttccccggtgaaggtgctgccttgccgtatgacgccgcttacaagcctaagccggtttacggtgcgattcaggcggctcttcaaggcgcgagtgatcagaccgcgttccaaggcacgaagggtggcaaaggaaagaagggtggcaagtaagctcgtagcttcaataccctgtctagcttagcaccgtgaaaggatcgaagtaaggaagcttgaaaaaagggaagggcggatcttgtacgaatcgggccacgccgtcaatcggccgacaaatttgtgatccgcagatacataataaaggcctgatcttcgcgcacaaagtctcgagcttggtcatgtcggagttcgtcgatatctctcatgtcaggctccgcctcgagcatcgggtggaagagactatcgagcgaaagagatgttgggttcgatttactcgttgctgtcggggcgcttaagcgctacttagaatggagccaagatgatgcttaggcaatcgcgtgtgttaaccgattcgttgaggagttgtgagagatgttacaagtggaaacaccttgcctatcttagtgttgatgtcgtgagttttgtaatctagttgatgacaagggcaccgggagatgattgccacacacgagcaaatgcgctgttctgtgagaggcccgacgccgatcgatacagctcagctagagatggaagtttcgtgggcgcagaaggccgagggacagcaagcatgtatcgcagcgagatgtgctgatagttgaatacggacgcgatcgataccttggggatcaacgattattgatgtcttttctgctgagaaactataatcatgactaggcctgggaaatcgtgtattgtatagcgaatatgttactatcgatgtgttgactacattaccctgatgagtctctctctgccagacacacagctcgacgattgtgttgtcctccttgaactgacaggaccttccaaactcgaaattttgcttgatcccctgaggttcagcaatcgtgagcgatgatcttcctgctgaaaacctggcaatacgtgctatcctatgacagattggcgcgggatgccatgttgtctttgccttgtcgtgatcggtgttattgtcgacgtgggacttgatacgtggctagtcgatccgattgattcgttattcaagagcgaaggggagttcattatccttttcgcttgtagacttagaacgccacaaacgagcgtcttgtcagtctcgatatctccaccttgccgtagacggcaagtttgtgtgtttgatgatggtgatggggggatcgcgacgtctcgcctcatatcacgacaacttcgacgccatcatagccatggaacggatgcctccaaccgcatctccatcgatccgaatttagactcttgccctcggtcgtcgtcgccataccgccgatatgatcgagtacaagtcgactggatattatcatcccgatggactcgtcgtctccgttgtagttgcgtccatcacctcgttggcagacgtggcccttgccgccgagcaagcagtcctggacgatctgatctggtgcggaccgatgaacctcgttggggaacggtgtcgctaaggaggagtggtcgcgaaggatccgggcgaggagaggaaggtaagtgtggtgtataacaagaccgctagaaggaaaataccgaacaggcgatcaggctcagatcgggtcgatacttggagtaactcagactcacctcccgcctgtgccaatgaacccggagcgaaccacgtcatcccgtattcgacttgtctctagccggttcatgaccgtctcgatcgcttcccacccgccgggacatacggggaagtcgtcttcgacgagcatgatccactctgccggcttcgatcgttcaccgccgttcgcggtctcggctcgactctgcccgacccacttgaacgcctcgctcaggtgtagatagtgtccccactcgtcctcgttgtgatcatcggcgtccgcaaagaatcgtactcccggcgtccccttcgattcgtattcctgctccacctttcccatcaatttgtgtaccttggcatgggtgaacacggagacctcaacatgccctgggatgacgtgcggaagaaacgagtcgagcgtggtcctcaggaggccttccgaagtgatcggatcgggcgggcggggaaaggttaggacgaggatgtcgaggagcggtcgctcgtcgggggacgagggtagcggtagacggagaggtgggcagccgagtaggatgtgacgaagtatgccgttggcgaggatgtatgagccgagtgcgagatgtaccttccatccccacgcagctcgagtcgagtctgttcctttgttctggtggagcggttgggatactggcagaggaagcgggacggtgccatggtggttgaacctgccaacgagtctcttgatgatgtaggtggacacgaggacgacgagcccggcggcgtatgtccacggggtccgatcagtccaataaaacgtcgtgcagagtagcgtgatcagccccgtcctattatcgttgagccaagccccggtgccgatcatcttgtcattacagaggacgagatagatggcgaggacgactccgaaaccgtgactacgttcgtatagagcctcgtggtggaaccaccggggataaatccatcccacggaccgggtgaagacgtaccccacgatcgtcctgactccggcgacgagcaaccacaaggtccagcaggtcgtcaaggcgtgatagacgggtgtgaggaagaagagggtcgtcgagtggaggacgagtggtgcaaagtggcttacgatacgcattgctaccgaggatgaccattgattcccattgtcgccattggtcccgagattgctcgcccacaacgacaagacgaccggcagaatgcggccgccgtagataagactttgtggtgtgaatctgacgtcaggaacgacaggattcaggaagaggtcgagcgtggtgagatagagaggcgagagggagagggcgagtcgaagcaagaggtcttgacgaggtttcattgcgaaagggcagggtcgaccagctggtgagaaattgatcccgtccgaacgtcgaagagtgaacgactagagtttacagcatgaccgttttgcagtcagaccaaatggacaggactagactcgactttggatgtctgcgaaaggtcttaaagcaaagcagatgtcgttctcaatatcatcgacgtgggataaatggtccacgtcgtcgaccattgaggatgccaacgggccgatcggcgaattccctttcacatgacacggcaccgaaagaagaggaaaatctcggcgaattagtcgaaaagatgcaccgcggatggaaaatcacaagctaacgtggtacggagcttctcggagagccagttcgacctacacaaagactctggctagcttgactcatgatccagtcattctcgatcatttccgtctattttccaccggtcgtgttactgctctcgacgtcgccggctgcgagcaagacgctatcggtcggcgacttgactgggcgcggacgggaacctagccgcatgtccgcactcgcggcgccgcgtctcaaaccgggccaaccctcggtccacgtcgacggtggttcaacaagggactgatcgatgactgcatgcactcgcccatggcttgtcgacaacaacgcgagcgtttatgcaccgattcgacccagaaggctgggcatttcgcttcgaccaacaaggcgattttgtcgatttctcgcgcgtgagtctaaattgaagatccgcagagcgacgaagagtttaggcgtccggtcctgtctcgcaatgtctagatatgtcgagggtgcagcaaccaatcaatgtcgtcaatatgagcatgtcacagccccatgccttgtgcgtcgctagtaacattgtgaagctgtccgactgcctcaaatctcttgggcctctatgtgccaccgaaatagatccggatttgatgattggctgacttacggggatgacgtcaaatccgcggtgcgtctcacaacgacgttcatcgcggacaaccaatcaacgcgatgtcctcgcggatcgctatcgatccgagatccgcttccgccgttttcaacagggttctatccgggcacaaggtcaagctcgccagcgatattcatctcctttctccatcttcctccgatcgacccatagacctccaaacacaaatgttgtctcctgcccaaactcatgttcagggaatcagaacacaggagctcttatgaatgtcactaccggagcagaacggtggttcgccgcaaacgaatcgaagcggcggccgtcaacgggatatcgatgacctggctgatcagcgatggggatcgtctagtgtcgacgataaggatatcggtgttggtttcgaggcggatagcgcactacctcgatgtcgggatagctcgattccgggaccatgccggatgaaagaaaaggcgcaggaagaaaaggatcccgcaatcggtgaatcctcccagcaatcgctgtggatatcaccgggtgacgactacgacaacggcgtagctcttcggccgaacgttcgaagctgtctgcgaactcaccgggtcgcagtgatatggtccctggctatctcggccagcatcgtcatggaagcatacgatgctagcttgatcagcggctttttcgccttgccagcgttcgctcaacgttttggaaagcagttggaggatggcaggtggaatgtcgggtgagtgttgtttcggagcgctgtcattgttcctttacctccggtagacttactctcgatactcgccgcttaatcgccttaccgcatgctcaatcgaatccggaacccgactcaacctgtgttctgaaacgtcagtgccggtacgcagacgctcctgagacaatcgaccaagatcggccaactcgtcgggctctccctcgttggctggtccatcgacaaattcggtcaacggcccacacaactcgttgcccttgctaccctcgtccccatcatcgccatgcaagtctttgcgccaaacatcgtcgtcctcgtggtcgcacagacattggtaggattgccgctctcgactttcttgaccttgagcaacggtacgtggtgtgacatcatgacatgcgagattctgtactgactgagacacctccaatgcccccaccagtctatgcagccgagatcacgccagccgtgcttcacccttacctgaccacctggacccaaatatgttggaccctcggatcgctcatcgctagctcggtgttgcgggcctacgtaactaatactaccgagctggcgtatcgagtcccgttcgccttgcaatgggcgtggctcttgcctatcgccttgatttgcacctgggcacccgaatcccctgtatggtgtgtcaagaccggcaaagcagatcgagccgccatcgccatccgacgactcggaagacccgacgctacaaacgagcaactgcaacagcgattgtcacagttagaacgggtcgatcgggccgaatcaaagacggccgtccggatcacctataccgagcttttccgtggaccgaatcgccgccgtaccgaaatcgcttgcgtcacgtttgccatcccttgcctgtgcgggtttgtgctcgccaattcgacttatttcatgcaacgcgccggtctcgacccttcggcttcgttttccatgaccgtaggcggtgccggaatcgccttcatctgctgtttcgtcacctggatcgtcctttcgtactacggaagaagacccatctacatggtcggcctcgccgccttgatcgtgaccctcatcgccatcggtggattgggaatcccggaaccgacgtcgacctatgcgtgggcgacgggtggactgtgttacgtctttgccatcacgtactatctcaccgttggacccgtcacctataccatcatcactgacgttccgacgacccgcttaagacccaaaacggtggccctcgctcgtgcgacacatgtgacgacggccatcttgagcaacgtcctgtcgaattatcagatcaacgtaaccgctctgaattgtaagaagagtcttgcttcgctgatgtggctgccgcgtctgactgctgatcgtttttttgtttccctgctttatagggcgaggcaaggccggcttcttctgggctggatcgtcggccatctgcttgacgtggtgtttctttcgcttacctgaaactcgaagcagaagctcggtcgagcttgacgaactgtttgttcgcaggataccggcgagaaaattcgcaagcactgagttgaattgtagagacgaaccatcatcggcttaccgtgttcgtcgagacgatcactcgtgacttcgagcacgtatatacaatcgatgcgattgcgcagcgcgcagcaaaagtgaagcgaatcgcattgtttcgaccgtcgctgaagaggcagacatgtcctgcaaggaaagacgagccgacctgccggacgagtaggcacgtcacattgtcaccctttgacaatcgaacgcgtcgcccgcggcgggcgaaaaagcgcaaggtacccgacgatagtctagacaagtctcgcttctcgcgcgttctttgcgcgcaaaatagctgtctgcttacctaatccttctcgatcgacgcgtttttccggatccgctcgcctcgtcttctcctttccgtttgttgtgatggtacgaaactctgacgaatgacaatgttctcgatctcacctagactttgtcatgtactctatcccaagtacatgtccatcaagtgaaatcaaggctactcattcatctacgatattctgtccggctgcagcaatccggaccgactcgaagcgggatcggcggtgtgtccgttcaagtcttccgggtcgatacgtcctttcctacccttatctcgctctcgaccgcccatcgctctatcgcagtaacgtcgtagcctctggagattctcgacaccttagagacctagtaccagtcccagaagtaaccttccgttccgggttcgcaaagtgcctgctgtctcgagcgcaatcggatctaccagcggatcagccacagaatcgggttttcgttcatcgacccgatcgtctgtagccatccactcagggcgtctccgtctctcgccctctcgatcggggaaaattaggactgcacaatccactgtcgaaaactggagatggtagacaatcgacagatgagagcgaccaaggcaccgtcgctgtcgtcatcctcgatgacatccgggaagaggagctgggacgacgctcatgacgagtcggccgacgatgaacaggaacttcagcgagaactagagatcattcgagaactcagacgtagacgccagtatcaatcgaaggatcagcagcaagcgggcaagaccggccgtcgtgagggaaaaggtgatggggaagcaaagagacgaggattagcggttcatgccttagtcacgagcggtgaaattacgcaagaaaagaagaaacagattatggatctcgtaccgggtcagtggctctttccttcggtcttcccctcgagttggtcgctgacacgctaatgctctataccccacccgtcgccaggtagcacccgtttccttctcgacatggatcatccctcgcgatcgataaacaatcccgctgctcctgctactctgaccaacaaatctgctgatcaaaatccaggacaagcgactttgggtgagactcgtcggtgcggtttctccacgttttcgaccgatgctcatgtcgccgatacttcgttttgcatctatctgcgttgtagccacccgtcgatctccatccccattcgttgccaatccgttcgtcacacgccctgggagaaggggacacacgcagccttccgatttgcaggtcggaagttctacgaccgtttacaacgccagaaccgttcatcctccttcaattgctgccatcgatccgacactcctgcaagctgtaggctttgctcctgctcgccatcgaacctctcggtcaccgtctcacacttcggacctcgatctacccgagcacgacgtatttcccgagctgcgacaagaagacgcggatcttgaaactccctctccacccgctcgaccacgggtcattcgacaagatgctacgcagaccgctcaacacgttgccgatcgatctcctagcgttgagaatcatcgcggccgagccacttcggttgcggatacccctcgcggtcgacgatccacctcggctcgagaatcggatgggtatcacgacgacaggctgggagagcagtctattgatgatcaaggagaggccagcacaagaaccgttgaagacgtagagaagaagccgatagcggccactcattacaaggcagttgtgagtactcgatgtatccctcggcccggctgggtatactcacagatgcctttcactgtggctgcactgctcaggcggcacagagaatcgtggatgatccgaacgcggttaggttgaagggaaacgaccgttgcaccaactgtatcaactcgaagacgaaacgacaatgctgggctattgcggaacccgaacaggacgatagcgagggtgaggaggacgatcacgtccacgtcaatggaagatgcgcaccttgtgtccgttccgggttgaaatgtgtcttcaattaccatcatcgcgagcgaggaggaagagcgaactcgagcgcggcacccagcgagatgtgggaagttctgaaccagatcaacgggtatgccgacttactgattcagatggacgccgtgggaggtgacggaatggtcaaaggaatcgccgataccatcaagaagaagatccagtcgctcaaggacaaatcgacgccgcaatagagtctcacgtatggtcggtttcactttacgctatggatgtagtacgtcaagggtatcatgcagcatgtcaatcgctatggcccgaaggatgcaggattcttcgctgaggagcagctggtcaggctgctaccgactcggattcgaccgaaaccattaacgcgcacagtgatatgtatcattttcatattttcgcaggctgtggaatggcgctctcttgcaagtacaattatttccgaggtttatcaagcagaccctcgctcaacgtgctcgactgcccctttcacttggcctgacaccttctcgttcggttcgccagtcacctcatcgtcttgcaaaactcggtggttctcgacgaggtcctcattacgaatggctccagcaccctctcttgtagcaacggcttgctcgaatcggctcccatgctgttatgaagtcgcggtcagtgcgtgatcgaactcttgttgcttcatgtcatcactgacgttttccggtcctatcagcgtcatgatcagggtccagccgatgatgacacctagcaggacacctatcaagacagtagtctatcgcgtcaggtgaaggttctcgtcggcgggaatgacacgcaaacactcaccttgaactttggcatagtcgggaacatctcgaccctggacggtcgttcgccaattctcgccacctctcgcttcgatctgggcagacccgctactggccatgttacccaattgataggcgataccggcgaacgatgctctgaaagcggggggtgaggactctgacaaatagatcggaacaacacctgccagaatggcgttttgtcagaaaagaaagcattgaacaaacagttgtgcctcgaaatataagcataccctgcagattgtatcccaagtcagcgtcttggtcacgagggatgagccggaagaagcgcccttaacatacccaagctccctggacaccgaattgcagcagaaagacgccagcgctgactggagacatggcaaaggctgttcagaacgagactatcttccccggggttaattgctgcaacttactgcctgcgaacgaagagggcaagatccagagaggaatgaacgcccccgtccagacaagcatgatgatgattgccaaacgacggccggtgtattgtgaaaagtatccggcgatgattcctccgacgacggcaccacagtttgaaatgatggcaatcttgctggtatccggccccgagaacagcttgttgtcctgcaaaaatagcggaagaagatcttgggaggcgtgggacaggaaattgaaaccagtcatcaagcagacttgaagatttcggtcggtacgaaggtaagtcgactggacggcgtactacttgttgatgagagtgccactcaccggcccagatcgcccgcctccaattggccctcagcatcgccttggcctctttcaaaaacgcctttgtcggagactctcccttgccgccggcagactttgcttctagtttcgcttccaaaaacgatcgactttcggggaggcatgctcggaatccggcggcaaaaacagacagcccggttccaacccaatagagcgcgcgccatgaatgaggattattgggtacgagcgtgagattgaccacggcggcgatcaggtaaccgacggcgtagccttgttgcaaaaagcctgaaactaatcctctcgcgttgggagggatgttctccaaagaggtcgatgcggccagcccctagatcaagtctcgacgatgtcagcttggcggtcggacatcggggcgagattgtctggacgcacccagattccgcccatagctactccgaacagcgacctgactgccaggaattgctggtatgtgttgcaaaaagacgacccaagctcgaagatggcgattaacaagaggttgatgactaacgtccacttgcgaccgtatctgtccgcagcgattccgaaaacgacagccccaacggaacgaaagagaagcgtcagggtgatggctgtcgtaatgtcggtcgaactccggtcgaattggatggagagacgcttagctgatgaacaagaaagtatcaaggcaagtttgtcaaaatcgacgagtgtttcgtgcgagctcaagcggacttaccggtcaagctgacactgaagtactgaagggttatgtcaatgaatcggaatcggtcaaatctaggattgcgacgcgtgaacgggcgtaatctactcacgtcatatccatccatcgtccatgccatccagcccgagagcaataacatccagcccgtaaaatcgatcgatctcataatactgaacggactgtgcggacgcaacgcaaaagcgattcaagtcgtcagagtccggcattggtgcagatagcaaggtgactgatgccgcaaccgagaggtgaacatggcttacttgacgatgacgtcgggagtccgtccgggtggtttcaggctcttgagatttaggaaacccatcgtagaatgctaggtcgtgcgactcgaaaagattaggtgtgggatccggcacgattcaaatgggtggcttcgggatcgccaagctcgaattgaccccccccccccacattgttatatactccagcgctgtgagccatcgggaatcggaccggcatcaaattgacctggatgtcatccatccacgcttcccaccactgtgagggcggggtcgaacagagtacggccaaccattttgtggacgatatcatgttcagcgcgcgctagaatccaaatgaaatcagtggagccgcggggaatcggccgtcggatccagtttttgtctatttcgagcgatacttgccgaacttagcgctctattctggtgaactcgacccggggtcctcgctcgattaagcgacgatgatgcagtggcgtatacaggaagtggcaggaccggcgttgacgatcaaactgttgtcatagacccgcggtgcgatctaacaggatctgaagttgctcctctcggggaagaaccgcttgtctgcatcttctcgtgagtcagacaggctatgtcctctctgataccaagccacgggcgatttctcgagaaacgtctcactccttggggtccatcccacagccgatttgggagtaagcgaaatcttgcgtgtacacgcaatgaactagaaaagacatagctggtcgccctcactccgaggacagactactgagcttcgaaacaaacttgcacatgttgcctgatacaaattcaactagcctgacagacattcctcgatccacgattatcaatcgatactcattcgatggcctttcatctcgatgtcaacttcctccggtgtagcctctcgattgttgttcgattgctgtcttcctctgcgtttcttcttgcgtttcgtgctgacccgctcgcgctgacgtttgagacccttgtcaaagttacgcatgacgatgaacgaccacgtcaaagcgagcactgtgatggcgatcgagagcacagcaaaaatggtcaaggactgggaagaagcccatgttagattcatcgatcggttctctagcggcagaaacgaacgctcaccttgaagacgtcctggaaagtgctcttgcgtcggtatatctgaatcgtcttgtagatgaaataacccgcggcaccgcacaaggccgccataaagccagactggacaagcgacgactatgaatgggtgtccatgagaggtgtgacggcgtgactcaccatcaatatgtgcgcttctctatgcgccgcgaacgctccccagacaagtacgagcatcgagatgggcaacaaagcgagagtcgcccaatattcgccattcttggtctgatacaggacgagccagacaaactggcaggagcgacaatgtctgtcagacgggatacaatgcacgaactgctcgatgatagagatctcacctgaataccgaagccggcaaagaagaacgcggcgaagcgcaagatgcagacaaagatttggtaatgaaagttgtacgccttgatccgcaggtctgctccaaggtcttcaccacagcgaagggtcatccgtcagccaagagagacccgctcgtcgatgtcgccgagcggacttgccgtggtagatctgccagcccatttccttgtagacgaaccagctcacagtgaccagaccaagctcgacaaacgcaatgacaccgagcatggttcccgtcagcgcgtccactgggatgtcgtaaatcgcttcggatacgcttgtatccccgtcgatgtcgatctggctggtatttttgaatatgctacgcaattccgagatctgccacggcggcaaggtcgatcgggaatgagctgcgtccgtgggatgggacgaactaggccagtatggagacccacttgcaacgccgcccaggctaaaaacagggcgttgaaaatggacaacccgatgatctgaatcgtattccgatgatacgccccgtcaatggccaagatcatctgccacaagctgggtcgttgcgagatgcatcgaggatcggtcattcaacgagtgtgtctcgatgaacggctcgggcttactgtgcgagaccaaagatggccaggtagaccggaaatttgcgttgattggtcttgatgacatcggtagcgaattgcgaggtcacggcgcgatcaaatcggaggtacaggtatacctattgaaaaaacacagaatcacatcagcgcggctcgattcggttctcgttcaagcgaagaagcggggctgacctgaatggcgatatcgacaacggtctcgataaatacaagcaataggaaaattctcgtccacctggaggccgggagatactgccatgaaggaagaaaagagtaagctggtcagaaatagaccgcaattgaaagccagcggactgaacagaccttttcccacccctttttctgctgtccgctcgagtcgttgcgtcgcattactctcctgtgactctgagcagagcctagtccgactccggtccctgtcagcttagtcccactccttgagacgcccgggcttgagctttgacccgtgtcatcctcgaagccgacagtatgatgcacctcgctgctctgatcgggcgaatgcgggtcccggttaccgatgggttgcttgaaatagtcttttccggcatccgagctagcgatagacaagggcgaagcaagtaggtcaaagtcggaagggctagacatcggttgagagggaatgtgacggtgtcgataccgctgttctcggttatccagaaggcggccttccgtgtcgatgcattggtcgaagcgatctcgattatcgtatgccggtcgaatgtcctggagagatgattgtccaggttgatctggtagcctgcgcacgctggactcctcaaatgtagcacagaaaggcgagatgacgggtaaagagaggagttcgagatgaccataactttcgctcgatgtcaccgccgcagaagcggttcgagggattggccggaccggaatatcgtcgcttggtatcatcctggacgtctgcacttcaccactgtcatggtctcgttgtcccatgccggcagcacctcgaacgagagctcgagagggatcgtcaaattgcattccgtggtcgatccagtagggcgcagcggcggtcgtctaaggcgatatggggctcgtcttcgtccctcaggtataatactgtaggtcctgagctggaagagagtcaaagggagtgcagagtgcggggtactgtggccgagatgatctaggggtcttgtccgagatgtagatgttgatcgagaatactacgtgaccttagccgagtttggcggtcgttaacgttcgtttaaggccgtttctcagtcaaaagagagtgttcactagctcttatcatatctcctgtaagaattctgggcaaatataacgttgtcaagtcggaaagtcgatcttgagatggacgtgaggtatgtagtagatgggttgtttgtttcgttcggctccgagcgagacgtggcaggaaaaaatcctcggctccgaaaccaaagtcgacgcgcaaacaatcgaatgaccatcgacggtgaacaaggtggcaatgtcaaacacacaacaccacattgtcattggctcctccttgtcatacggctgggcgctcgttcatgcctcgccggggccaagcttcacagaaaattagatctgtaacaaatcgtccagagtcaccggtagccagtggcgcacctacaagtcacaccgtgcgcaagcttcttgaatcgctcaaaggccgcatcctgcaatactgaggttgtcttatcgaaagcatgttgggaacctgtttacaagagactatacaccggtggaatgaccctgacttttcaaacgacagacgcttacaaccgggatcttgactgcgtagaatttgatctgcccatttgttttttggcgtcttttttcgattgcgcctcagcctttttcgtctcattggctattcgcttggcctctttatcagtttcaatggcagacttcttggcttgtttttctgcttccatcgcagccctcttggccaaccgctcgctctcagcaggcgacctcctggactctttgtccgcctcgatcgcagcagccctcgcctgtctctttgcctcgacgttttgctgtgcttcggcatggacttccaatgcgactcttctcgcctcttggtcggcctcgagagctgcttgctgctcggcttcgatcgctgccgtcttttccctttcaacttcttcgagagcctgcttttccttttcgatccgttccaacgcctgttgtttgagttgcttctttctgttcttggtgtctttgaccgcgatgttgaaagcatccaggatcgattgcctctcctcgatcgtgctacggtcgaacgcttcacgactcgtatcttgcctcggcttgaccagagggtcactggctttacgcttggacttgcccatggcattgataatacctttcgtaggctgggccacgagggcaagagcacctggaatacaccgagcaagagttgacgggtcagtggtgcctcgacccgagaccgttccatcgaatcgcacccgcagccggtttcacatgcatatccgcaatcccttgaagaagccctcgtccggcgccgacccagccctgtgggcatcaaacagatcagtccttggagccatactatgtaaatccgagaatcattggcactcacatcctttttgccccctaggactggcttgtagaccagccctccaatgccatcaccaaagccgtaagcgaaactcttgacaccttcggcgaacccgtcgagggcaccggtgggttcgtgatgtcggaccgtgctgccccaaaatttgggcatcgattcgagacctgtttgagatgaatcggcgtcgtcagtgcatatcagcctggatcccttcgggcgactcactgtcatagatcccgccgacaatgccgagcatgccggtcacttgaaaacaggtcagcttttggatcccttggcgctgagtaaaaggtgcaggtaatagcgtcagatcggaaagtcattcgaaaccgggcaaagaagagcattttaccggcttgtagaagagttcggccgtcccgacgacgctttggagcagctttgttaggcaggggtcttaggggcagtgagactatcttaccgctgctcacccgttcgctatggtgcgtaatacggcattgacacctccagccagggggtataaatcggtaccttttggcatgtattcccgtgttcctggtttccgaccggtcaacgtcaggtagtcgattactgatagtcaaaacccaccactcactgttgggtcggacatcatcccacgacatgagacccgcgtcgaccaaagtgtacgctgcgagtccgctcaaacggagagccaaatctttgttccgccaaacagcgacacgtgaaggttccagatcgcaacgcatgttgagtagtggtaggaatttgtggaatgacttgacagccgctacctccccattctgtaagcgggatcataagctgagccatgttccacgacttgactgatgctcacttcactgcggatttgttgtccaaatttccaagcagcttgcttgacttctgggctcagcgcgacttggatcgccttagacagagtgtccacattgaacttcttgaacggaattctatcaccatgattgcccgcggatgagcttcggtgcatccgattccggctgataaggtatgcttacggctcaggtccagctccagctctagccaccatggcgccctacgttcagcaatcgaggttacggtgagagaaggcattagcccccaagattccggatctactaacctggaagggctgatcgccgaagaacggcacaacgattgtgggcagaccatttttgagaccgatggccgtcgttcctgcacctccatgatggcaaacggctgagacgcgtccctcggcaaacagccagtcaagaggcacgttgcctgcaatcatatgcgaatgagcgtctattgggatggctcacatgcttgacacgagaactcgcctagaatgaacacgtcgtcaggtacattgtcaccgccgatatcactccagcctgcgctgacgagcgcccgaacacccgtcctttcaaccgcgtcgaagatggtcttggtcatggctgcgggatcgtctacaacgattgagccaaacctgaaccgccgcggagcgtagctcagatatcgatgataggtcggcatcaggttcaatgcatgcttacccgatatagatcggtggtggaccgtccctcaggaacttggccaattcgggttccggcttgtattccccgccctcttggaggaagaaatacccaacgacgtcttttcgaagaggttatcatcagctccgcttccctgcagagtcgcccaaatcgttcggcgccggctgaccgatatgagctttccaatcctttggcttgggaacgactgcggaactccagcagtagatgtgtgggatcttgagccggtctgccagaccgggtccttcgccattctgcaattcgctcaagaacaattccttacgcctgaatcggttgatggtcggaccgaggccttgccaagtcatgacttccgccaggccgtaactgaggtagttggtcaatcgatgttcggcattactttgcttgatattaacgagcggatggttgaactcggtcgtgggtgaccaaggcattgctgcatcccgtagatatcgaatcagagcccgcgcgtgcaccgaaatcggccatagtactcactgaacgagatgatcaatggcaatccagccatctcggcgatatgcacatgcgcgaaactaggcggattcgagatgatggcatcggcagcgaaggatcggccggtcttttcgtcgggaaagtagattgatcgcaagaatttatgcagcatcttttgtcgtagtcggtattccgtcagctaggtttggtcaaagcgactgtagcttaagacgcacctctttgaccatcttctgtttcttggggatgtctccgttcgtcaacgattcacggccgggcaaaaggccagggtctgttcgtcatacagatcgtatcaactgccctgccgttctgaaactctggggcaaacgactctcactcttcaccatgtacgccatcaagtccttgggactaccaccaatatcgaaaaattctaggttgtccaacaattcatcttcctcttctttcgccagatcgcgtacggtttgaggccgattttgtgagcgggactggtacggcgctgcaggagattcggtatacaccggagctaatccttctctctgttccttggtccaacgtttttcattttgccactcccgtaatccgtccggtccggttccatcatccgaacgagatcctgcagcagagttcgcaacggagctccaaccggtcgacgttgttcggaccttccacgtcccgttgcgctttctctcattcagtcggttccttaggacgttcttgcccgttccgagcacgaactctctgaacaccccgtgcgtgcagatccgaactctgtgcctgctatcacacaaaatgaggtcgagagcaagcgagaggtatggctggacgtccccacgcgaaccggtgataaagatgacgatattcagcgaggggaccgcagcatccgggttgggatcagagttgtcgtccgtgaaggagatagcatagtcgctagggaggttaggaagagccttcttgaggttactgcgaacaaagacgagagacgtttgtagataatgtcagcggacccgtcgatcactcactgaacggatacgttgcaaaggtcgacggggctgctcacaggaccatgtcaatccttccatcttgggtgacatcggcgctcgtctgtgctccatctccatctgccgaaaaggttgtgatatgctcaggtcgatcgtcctcatcgtccgaggcgagtggagtagacggggaggaactgggctgctgggtgaagatcggtcgagactgggatggatcatgcagccgaagaccactgttaccgggctgagagaggtatcggcgctgctcccatgacttttcgggaagtggtggaggagtgtcgataccagaggaaggccgatagagaggtggagcggtatcatagtgatggggaagagggcgttcagaatggccggtttctaaatcctcagaatcgtgcggggcagtcgtacccttgctctcgagcgaacggtacgatgcctggcgatccctcagagtctcctgcacggacacctcggaactgaggtttgaagggagttctttcaggctatatctcgacatattggttctagattgttgttctcgctgtttgccggctgctttgtcctcgttcgacaggttggcgaccggagctcgaccttatttgcatggaatctgccaagacctagagctgaggttttcacagacaggacgggataggatagcggagattaaactgaatagacaaggggaattgatgtttgtgggcgtcgatcggttcccatgttgatactactgcgaagctccttttccttccgtcggaccgtcccggatgtccgtcgggattagttgagcaagcaccacagcacagtcgctaaggacttgctagaaacatcaacaggaggacgcttctgcctcaagtgcatatccggtgcggttcaggatagaacgaaagtcttgacgacacgatgaatgacggttgtgtgatgatggaaggcccgctgcgtgtgcgtatgatcctcagaggctgctaggatgggtttcggagccgagacgtctcgctccagcttgcttcgatctcgataatctcgatgtttctagacaaatctaggcaggtcatgctcaacgccgcgcgtctcgcaaagacgtctttctcacgcgtctctgttatcctgtctttcctgcaccgcggataccctttattcctgcacagccagtgactttcaaatgatcgcctcacttgccgacgctgcccgtgccgtaacttcaacgcccaagcggaggctccagaactttaactatcggtgccgctcgtaaccaactttgtctcatcgcgcccttgggagatgttgcggaaagcgtcttcgatgtcactggttacacaggcactatttaacccttgaactaggctgtactccacttcatcgatgatggatcgagctttgggcctaacgcagagaaacgatgtcgagttgcccatttcccagcagactcacgtctcgacccgctttcatgatccctcgatgttctgcacagtaacactgacacgaacttgaggaagtccgatcatctaatcacgcagcgcattgtcgacggctcagaagtcaacctcgataacacagttacgcatcggcagactgaactcgcactatcaagaagcgacgcacaacaacatctcggcgacacaagtcactcggtaatatttccacgacatgcaagcgattgacacgaacttttggtaccagctacgccgacccagacggaatcaatcacgactgcacttgatgcaatcgacgcttctcctcgagtttagtccatttctgcctgaccaatcgtgcagcttcgttcaggacgaaaccgcccccaagtgactgattccgtacaaaaccggatcccactccgatacgagtttcgcaaaaacgtgtttctcttctagtggtttcagttgaccctccgaggtagaaatccagtcagagtaccgagggtagatctgtctgatcctcccggatggaatgatctcctgtgattggtgaaggatctgtcgaaggcgggaacgcaatcgagtgtaaacgtcgcgttcctctacaacgtcatcgtccaaatttcgttgcgctcgtgcggcttcgtcgacgtcgcgcaaaaagagcagatgctcctcatagagtaatccaagtttctggcgggttcttgccggtgtatgctccgcagcttgcgcgaccctatcgcaatgattccctaacgctgtccctggagatcgtcgtcacaagcttgagcaatggatgtacagcgaaaagaacggtactcacggctggggatgatagaatcaggccacatgacgtatgaccggcaagatgtttgatttttttccgggcagtcggcagatcatcattccctaaggaaaacacaaatcgatcctgttggcctgtgctcgtatatatactaacgcgactgcatgcatccgatcgatttatgcacaaaggagggctcgatatcggaccgtattcgacgagaccacatgcaaggcaacatcaattctcatgacgatccctttcatagcgtcaatcgtacgccataatcattcggcatgtcgaccactgcaacgcgatcacacaaaggacgagtcgggtgaaacgcgtcacggacatcaagtttggtttcgaatgtccgcgtttgcttccgcgcggatccgagatctttctttccggttctctctctccgtcgtccacgtcgacgtcgatgtcaatatcatcgtcatgcgtactcgttgaaacctacaaatatcgacaagcacacaataagcaacgaatcagccatggggaaacacaagaacaatagactctatgtcactcacgacgaacatgccgccgggttgtcctccggatcggttggcaagcaagcaccaacggggaccggtggaatccagaggttacccttgtaggtcccgcggttctctcgacctatttctcccgcatcgtccatccatcgagacgctcactacctcggttctttagcgattgttgtgcactatctttgcagcctttcaagaatccagtagcggcaatcgtaagagagcagggtgaccgcgggtcaacccgtgcagacgtgttcgatctcctcaatatcgtgccgtacattcgcaagttcggtactagtaagtcagcgaggctcatagctcctggtcggtccatcatcactgacatgttccgccattatgactgtgtcatctggtagatcctgcaacaggaacgcctttgagcacgaacgatctggtcaagctcaacttccacaaagtccgtaggctttccttcgtggcagtcggtacatgtcgtataactcggccaactccttgtcctcttcgaatagaacgcagaaggatcataccatgaccccattacgtacaagcctttatctcagcatactcatatcgtctttctcaagacaacagtgagttcgatcctccttcgtctgttctcgctcgttcaatttctcttgttgacccgagtgtacctgcacgccccaaatgaaagggcaacgtatatgacatgtcttcgcttcatatgctcgccatcaagaccaagatgttcagggatcttctggatgagtcgccgttcacaaaggctgatgtggtcactattcaggttcgtcttccgctctgtcgatttgcatcgccgtgtcttgcgtaacagtaaagctgactcgatgctgcttgattgctctctcttgctctgcctgtcttacaacctcgtctgtctggacaacgaacgaacaggatccggagaatttaggagcgagagatttaagttcgtacgatcacgtcaaggcggacaaacgggtagacggtatgttgggttcttgtcggtgtcgctcatattattcggtcggcccaccgtgtctatctgttctgtgttggccgggggaaaaattacccatgacagaaacggaccgagcgaacgatcctttgcgaggaatcaacgtcgacgccgctggaggtgctagcaaggttctgagaatggtggccgagagggtgagccccgtggacattgcttttcatcgccattctcggcatcgctgatcatatatcggctttgcagaccaaggctagcgatgatctttccgatgaagtcgagcaaaggcaagaggaggggattgtcgccgtacgcccacaagttcagaaagcttgtgagttgaccctcggattcggaagcgccagagagtctacacgggcgagctaaccacgcgtcgatgcaactcactacgtccggctttcaaacagacaatgcgtccaattttaccaatgggcaggcgtcggcttcctttaccagcacgtccttggcaccagcagctaagaatgagacggccatgtttgatgaagaagagtgtgagtcgtgcgcagatcgcggcggagcgtgtctcgctgatagtcgctgctttttcggttcccctcagacatgttcgacgaaatgaccaaggcaacaaaagaaaaggatcgaatcatgtacaaaggatacgctacgatccgaaccaatctgggtcatttaaatgtcgagctgcatgcggaccgagtcagtccattggtaccgatgtttgtcaacaagaccttggggctgatcggaaatcaattatacaggctccgaagacggtatacaattggcttaagttggcagagcagggcaagtacaacgatgtggtgttccatcgacttatacccggctttatggtaagacatcatccgggcccctaatcgtcccaatgatacaagctgatcgggaccgacctgatatcatcgtagattcaagggggtgatcctacgggcactggccggggaggatcgagcttctggggaagcaatttccgggatgagtacgatatcaaaggagcctacaaacacgaccagaagggtgtgatggtcagtctcgtcgtcaatcattatcgaaaccgctgaggacacagactcatgcgcgtcccgctactcttcctagtcaatggccaatcggggtcctaatagcaacgggtgagtctatcccaaggggcctgttcccatgacagatcgctgatagtattcaccgctcgtactaggtcacaattcttcttcacctttcggcctacaccgcatctcgatggcaagcatactgtttttgggaaactggtcgacgaggatagtctacaggtgctctcgcttttggagacgcaacccgttgcgaaaaagggggatgcgcctgcggaggagatcaagatcctgggtgtcgtcatgcaagtcgagccgtgcatagctagtgttggtgtttggctgaccgatgatctgaactgccccccacttagcgtgcaggatccgttccaagtctaccgggataagctggatgccaagatttcgcggcaagatcggtctgaggaagcgcttaggctacgagcagcgagaaaggctgttagggatgcggatcgaacgacttggcttggtactaatttgggtgacaaggggaagagaaagctggccgacgacgatgccggggtcggcaagtatattgtgggtaagaagcaaccttcttcgggtacagtcacgggcgatagctttggtgggagtcaagcgaagaagactaaacaactgggaagctttggcaatttcagcggatggtagatggtagacgaaagccttgtcaactgttttcgtggccgctgccgctatcaatatgtacagcagaccgtacttcttgtccagagcaaagtcatggttctaggctgttatatatcggccatagtgtctatcgttagggtattctgcctgtgatacagggtcatcaagctccttcacatctatgatgtctcatctattgtctggtctatgcttcgtgatacgtcatgttctctgtcgtcattcgagaggatactgcgagactcccatctctagcagccatccttgagtctgttcttgggtacgggcgccccagtctgcgcccaggttgtcaagttggggttgttataagcttcagcgtgtcgtgcgatatagtcagccgttgggtaatctgctccgaccgaccggaaatagcgaggcgttagcgtgactatggcaaacaacagctgaacgcgcttacctttaggatcgcacccaagtgaaccgaaatcttctcgctggtatacgcggatgtattcaaattgcatctcggccggaaacttgaggtgttccttgtcgacatattggaaattgtcactgaggcccaggttcaagacgagagccatcggttcctcggggatgatacgctggcctactcctgtggcggcgttgggtgcaaggcccggagcttttagtgtccagctttcgacaccatccgatacccaggtgatgtaggaggagtcccgatcgtccttgttggcgtacatttcaaagccataggtcgtgtatactgcgccggtctcttcgtagacatcatccgggataatggtcaatccggagcatgactgttggtagacgcctccagtgtaagtgttccagtaggtgatgtctggattagcgaatacggtcgaggtgttgtcgaattgccaattcgcgtcatagggagcgatctgcagggtctgcgaaacctcgcccttctgccggtcgactaggacctaagtaacagtaggattatgagtgacgatctcggacctgcaagcagagctgaacctgtgtctcacctgcgcttcaatcatgtcaacctcgggcactccacgaccgatagagttgtcaggtcccggatgatcctctccaggacaggtacacgaaggccatcgttggccgggtagatatgacaaggctcctcctgtaggcgcatccaatgccgcagccggtccggtgccattgatgtacgtttggttggggaggatcccgacgtcacagctgtcatacgaatatggccacgtgccatccgtagtcgcgccgtaacctgaagttcgggaaggtcttcagttaaagcacgactcgaaacaggttgtcgggttcacttgcctggtcgacccagattgccaaacgcccagaccccaggccagaaaccgccaaccttgttgttaccgggaaggaccaacttggctgagagcatgatattcccgattgtcaactccttggccagtcacgttcacaggaggccgaatagtcaccttcgtaatacatggaccctgagaaacatagcttgttccagctctgaagcattcctgaagtgtagttcaggttatggttttccgtttccgtcagcgtgatgacaagctttccgtccctcgtggtaatggcacctgttgttgccgaaatacatcaaaccgtcaagaccactctgacgaacacgatgatcgagtatcacgccgcggcttacgaggatcgtaccattcgtaatcgttagtcccccaatagtgcaaatcgaccgcctcccagtagggatcatcccccgcaaagaaagtccttccatcgagctcaaactcgtccgagaataccaagtcccattggtttccatcgaaacccgtacgagtatacgcatcggccggggtatccggatcgatgaggtctctcccaatactcgcaaactgccccgtcgcattgatcccgccgagattgtaacccgagactttgcctcctgcggcattcccgtgacgattcgaatattctttcacaatgggcacaccgcaaaagacggcaatgatcccgccgcaaaggatgacgatcgtgcccatattcatccatccacgggccgaccagaacgtcgtaccttccggttcttccacgcgtttctcccattcttccaatggctgagagtcgagttgggcgagcaattcagccgtatcaggcgaggcgtccgtgggacagcccgggttgtatcccaaagacatcgagctagcagacgcagcgacgatcaggatgatgggcagcagatcccccgccaaacgcattcgctctcaccttgctgaaggcgatccgccgttccatcctccgacatcccccttatgatatcccactcccgacttgacaagtcgttctccgctctctgccgaactaggccgggattgtccagagaatgccattcttgatggatgcggcgcacaaggtccgtctagcgggcctgactggaacctgaaaacgacgggttgaacagaaacctatacgtcttgacaaatggtatgatgttgggcagacagcacgatgtcgttgccgtggatagtctcgtatgatgttctatgttatcctggcgctatggtgtctctgtgcgttgatgtgttgctcagtttcagtaaacatatggtattgacccggccgggcacgggacgctaccttgcacatgactgactgcttgtatatgaacgagttcgagagtgacgggataaaggcacgaaaaacattcccgtgccgcgacgatgtatccggaaggaccgctatatcgccctgtccgccttgcggctttgttttgatgttgcttctccatagcaatgctataattgactacgatattgtcaggatgctgtgtagtgtccatttgtttgcggggtatcgatctactctgtcgaagcgagcggtagggttggagaggtgaaaaaagtagagaagagcgggatgcggcgttcccgaaatagcgagatacaacaggcgcgagagcgagacatatatgagggcacggagagacagacagcaatgacaggtggacgtcggggaaagcgcgggtttcgagatctagggttaccaattttgattggctgggtaatatcgatgacgacgaaggcggcgtcttgaacgaaacatatcccccgagaccgcgtgcgggctgcggacgactcgcttagcgaaggcacaacttgccgcgcgagatgccgcgcgtgttgaggcagaggtgccggtttgctaggtgagccttgtcgctcatcggaatctgagcctcgcagtgtcgcgccagatctcgcaaaggctagcgtcacaggcatgacaaggcaaaatgctctccgcttgcgaacatcgacgatcggtgtctcacgtgatcacatctggcggttcctggaccgctacgtgtcgtcagtaactcgattgacactaacccctaacatcatctataccatcctctgcttaaacaactaactcaacaggtacttctatgccttgatatccgcgctgggttctcgtaccagggcaaacacagatctggctcgcaatgctccatcacttctttcgtcagaatcctcgctcatcctcccggaaaaaagagtacgactttgggccgacggggtcgctgcccatcggcgaagggggatcgggccaggtcatgcgggctaggtggaacacgccacaaggaggagggagagcggtcgctgtcaaggttgtcaggaaagagaaggtcgccgaggccggcgagtacctgaaaatcttgcacgagtgagtctgggaaagagccgagggggtgagacccgggctgaccatcgtggtcgaacgtcagcggctttgatcgaatacaggacaatcagaacatctgcaagtatacttggctggccaataaaacaattatatcgtcgtgttaatgaacgtggcttgttcgattggggtgacaggctgtattctagagtgagctccgctcgtgctggtcgaacattccgcctcctttctcgacatgccgctgatatgttctctcccgtcaaccgtgccgaatcagttggttcgagtcatcgcacaagtactacctcgtgtttcccttgttcacgggtggagaactcctccaacggcttaatgcaaggggcaggttcacggaagaagccgtcaggaggatcatgtgccgtatcttggtaagtgagatgaaccgatgccgaactcgtagcggaatgatgacaggggctcacgtcaggttatttgacatcgtaggagactctatcttttgtacattcgaacgggatcattcacagagacgtcaagccggataactttctgtatcgaaaagaagaatccgacgttgatgacgtggtcctcatcgacttcgggatatcgaaggtgggctgctgctggtcgttatgagtgctttccatgacaacctcgagctggtctcattcgcgtctgttcgtcgtgttcgaagatcctggataaatcgctggaaggggatgtggatccaaagacacagacggaagtggctgggacgcccggatacgctgctccggaagtgtttgcaaagacaggatacggaaagaatcaggacgtgtttggcgttggcgttatcgcttacaatctgtaagtgtgatcccggtcggcaggcgagtcgaggctgacaaagacgctattcacggtaggttatcagcttcgacgccgtggaagtccagagggtacgctgacatgattcgggaatcgatgagagccgaggtagattttccggaagggccgttccggggtgtctctgaggagggtacgttgggttgcgggaatctggcccagagaagaaagagagaggacaatctgacgctcatacctgcctgatcgttccagcgaaaatgttcgtcagatacctccttcagcgcgatccgtacgcacggccaggttcacgagaggcactaaatcatcctgtaagccgccgaatggtgcacaggacgaaaacgcttcgtgatactgattgacgatgctctcagtggttgtctctacgtcgatcatcggtcatgggccgtgctccgatcggaatcaagggggcgacgctcgatgtccccgagaaagaggtgcatcattcgcccagctcggcagaagatcagttgggaaggactccagtcgaaccgatcacgacattgaagccagatcatccggtggcaaggcagattactgccgtcggtgtgcagggcatacgagaatgagcgatctggaatccgaggtaatcgaaatgtatctactaccaggcttgcgtcgagagcttgtcggcggtcaaagccaagacggtgacggcggacaagaagctcgacaataccaacacgattcacgcaattcgaaaccgcagcctcacagggcccaatatctccgtctgagcgatcgtttccggacaagctgaactatgagctgtccatatcctgtactttcctggtcgctatgcgatatcgacggtctcgagtccgtctgcctgacactcagaaacacgtcatgaggatgccccgctaagtgtgttttattgataagaagccaatcttcggatccgaaacaccgttgttcgctgtctgcctgctaccccagcagttgtcattcgaagtgtcgacctattgaatcatatcgatgatttttctttacgcttcgccttacgcttagggacttcgcagactattctttggtacccaaaaactgtcatgcctcacccagccgtgtatcctctccctcccaacgtggttgacggggttccgactcaggccgaactggattcgtttcctcggatgtttacttgggatcagctcaagggcttgtaagtcgctcgagatagcttggatgcgggcataatcggggaccttacgaaagttttagtggaggctgagatcgtcacatcaccagcatattagactggtaaggtgactctctccatcgtttcttgcgggattcgattacaaagatatcccgagcacgacagcgatctggtacggttgaaacgaaacccagagctacagcagcgatacgatgagtggaatcgtcagctcaagagacgtcatgggacggtaggtgcgtgccagttcggcacatcgtaagcctcaatgagacacactgattcgagttggtgtctatcgcagaacgatacctcctcgacgtccgattaccagcagagtttacccaaacgttcgataatcagaattcgttccgcaggtgctcaccagtaaacgatactgaggcaagaaccgacgatatggacggcatcgagacgatggatctttcagaacggacggcggacatcgatccgtctggcgattcggttcggtatgaggacctgcacatcgaggatctgttggagggcggcaagggcatgtgtcttctgcctaacgactggccttacaatgtaccgtacggagtcaggcacagcatattatggaccaaggttagtcgaacggtgtgcggatgatctagcgattactcaaagcgccgacctttattaattcgtgtagaaaccgatctttcatcaatcccttgtcgagaacgacgcagaaatctggacccaggtgctagaagacgggttttccggaatatctggtcgatccgaaggcaatgactggcatactcctggcggtcatgagattcaccagatcgtcatgcgtttatggagcccggacgagtttgaatgcgcatgggtaagtcgaaaaaaagcgcgaaaggggagagtcgagatcgtcgctgattcggttttccgcggtcaagtttgtgaatccgtaagtttcgtctgtgcggagacaaaaatgacccctgactgactccgtacaagcgcaccagaccacgtctccaatcagttcgaggactatcccatgcccatatctttgcacgaaacaagagagccgataaccatggcccctgactgaattgctcaggtcgtggggacgtctccatctgcatatggcaaggagacatcccgctagccgaccgttatacaccgcaatgcctgaaatcggaaacaggggtcgagcggcgcagcatgtatggatgtctacccaggatatcgcggcttaactttgagctcggttattgcatagtcctacaacctcatcgtcgattgtaagattgtccgccacgcgtttcgtcagacttttcattatgtcgttccttcgaagaccggaatgcctcatggtcgccgtgtgggggtcttcgcgaaccagaaacccgtagtccaagctatcgtaataattccaagcatggtaacggtcgcaggtgcagtaccttgatgccgacagactgggccagtacgcttaggggttaggggtgctcacattttgtccagacgtgatctctcagctgcaggcaatgacggtctcgtcttttcgagggcgcgatgcaggtgttgatcttttatatatggctgcgagggaagcggggttggaactcgcgtctcttgttccaagaaccacgacaacctaccttttcccggtgagtttctggcaagctagcttttgtcgactcctcgttgtcatcgatcagagcagattcgacctgttgattgcggtcagttcaggcgtctatagctgtcgtcggcgccaagtcactgacctgtttgagcaattcggacttttgactcgcattcatggctttctctttgccccgccacagtctgagttgcgctggtgtcaaagcatccttcctctcggatgcggatgcatcgccggttggctggtccaggacatcgtgaatagcctctaattgagcattggatatcaaagattgcaggtcggcgccagagaatccggcggtcatggctgctagccgagacaaatcgaattcggctcccagctccaacttccgcgtgagagctcgaagaatctaattggggctaccttcagtacctgggccactgacgtatagccgcgaaactcacgtctagcctctcatcttcatccggcatgttgcacagcaaactcttgtccaaacgaccgggccgcaggagagccccgtcgatcaagtccggtcgactagcgttcaatcaggcattggaatcaggagagacgttgcaaggtatctcgcttaaatatttgctcacctagttgctgcgagcacgtataccccatctagaccctctgcgccatccatttccgttaaaagctgattgacaatcctgtcggtaactccagtactgtcatggccactgtgatttcacggcaaaagctagtcagacaggatgcagcgatcactcgaagagattccccctaccgttttggcgcaagcgaatcaaattcgtcaaagaacaagacgcatggtttggccgcgaccgctctagaaaatatgtcacgaacctgcaccagagaaatcagcttgagaaaacagcatcgatgctgcagacgtcgagtgcactcacggacttctcgcttgctccgatgtacttgttcagcaattccggtcccttgacgctgataaagtgcagtccacattcttttgcaacagctgaagcaagaagagttttaccgcaaccaggataaccatacagaagcagactaggcaagtttattggtcagctttgtgaatggtcactcgtgcccacgggactcacccagaacgcaacctgagtggacatttcgcgaatatcgccccgtacttcgtcggccattctagcgtctcacgaagtactctcctggtttcgtgcagacctaagttttcgtattccgttagctccatcgacctgtggcatccttcgctgcaccgacctccgatatccgaccaagcgatctgtgaactctgcaatttgacgtcgcgtagggaccgtggcttgcactctaatgccgccttggtgaagtcagcttgtacaaggtgactctgaaatgagaattctggttaagcatcaaacggatttttattcggctaactcacgcactgacctttgaagagccctcgatgactctgatcagcatgttttgaactgcattgtcaactaaatcgcgaatatctgccggggtgtagccttctgccagataggccaaagaaacgaaatctagatgcccctcatgtccggaatctgtagcatttgtcactatagtacctgcgcctgtccgagaccgcacaatactctcaaagatctgaaaagattcgttgtcagaaccgcttttcattctcatccgtccatcggtactaaccttttgcctagcaacagcatcgagggatttgatctctactgtctggccaaacgcatgcatcgtccgtagtaatgggtgcaagtccatagcagaggtagctgtgactagtactgaaacgcctcgtcgtgccaattcgctgagaacgtatagagcatgctcggctgtagcgcgtgtatgggcgttatcctcctgctatcaatgggctagcagatcagctagcgacccactgatgaggctcaggggggctttacttcagattcagtcttgaccaccgattgaagatcatccaaaatcacgatcgtggtatcggcagcgccgagcccgagccatccgtccagaacttcccgcatgcctttcaaggtcccgggtatattggctgccttgcagtcgacataatgcacctctacgatgacaatctacgtcaatagcattcaatcacgtacgtccgcttgaagacacttacggagtgttgtgtccttgttgacttccagacgccgacctatttccttggcaatggtcgtcttgcccattccattcccggccgtcaacaatagggctttatctgatagaacggcaggcgagcgtattgttgttcagcgctccattgttatttcagatcgtagttattcgtaccatgtcttgaacctctcgaacaagtcaagaagtcttcacaacttagaaggatctgatctatcccggctagtacgtgacctgaattactggacagatcccgttgtgtcacgagtgtctcggcatttgggattgtgccaattctcttccgagatatattcttgtctttcgtcggctccgagatcactagcctacgtaagaaacaagcctgatcggttcctggaatctgtcacggtcacggggatgtttccagggggagtgacgcaccggattttgtcccagtcgttcgttcgccacgcagcatctacgtctccttcatcaccccaaatcggccagaggaacacttggtcgatgggcatgccgtccagtgctcgcaatacagctttccgattcttcctcatcggccgagattccgcagatccgtcttctgccgattctgtattttgaccagattcggctgacacttgtgccttagggatcgcttctactaatatgcgatcgtctttgcaggtcgtcttgagtcggcgtgcgaaatttcgtagcgttttcctgtttgcccatatgatccatcgccgctcgtcgccatctgtcaatccagaggagccatcacgattggacgcaatttccgcttccagtgattgcaaacagtcggtccactggcagaagacagcggccggaatggtcctcagctggaccgaaggcaattcctgtacaactgagggtgatgattttgcagatttttcgagccatggatgttgttcccgaggtacgggccgagatggcatggattgaggtcccgcgacatcagtagcttgtttgatgctagccaggggcttcttgtcgtgcgacttgtttgaggatttattggctgagttttgtggctgggtcgaggccggcgttttagggtttgtagtcttccctttatgtcgaggtcgaggagcaacgaagatctcggtgtctgggttgacgagaacagcggtattgggctttgtggggggattggtctcgtctgcgatcatcggaggggtcctgtttaggcaattctctcgaatctcgccacggaacaagtacataccgacaacaagactgatctttgtcttcccattgacccacacactgatcgtccgctcgccgtccgaactagcagctcgaagctgagaaagtaggttctgctccaagtaattggtatgaagttcctggggtgggtgtaaagcgtgccttcatgtgagacgacgcgtctaccaggcggagcaaagtactcacaagaacctcccagtcgtccggtgttagaggagtcacgctaacacttttagctctcaaagggttgtgaatgatagcaatttctacctgtaaggccgcgtctctgctcagcaatccagccgttgtgtacgagctagtcacgaacgatttcgccatcttcccaacctagtcccctagcaacgtccgggtcaatctctacggtctcgaggccgtgctttccccttccagcttgttgcatcgagagcgaagaggccgacgagagtcctgaccatcctaggtaagcttgcttgactgagcggggtgatttgggggattggatactgaggtggatgataagagattgtggtcgctagaaagagacagtgtaaaataagccagctggcaacatgaaaccataatctcaaccttacagtcccttgttgtacgagtcccgagtagatggaaagcggtagatgaactaggttggaccgaagcgaccggtaatgaatcttggctttctttgacgacatggtcggggcttatggctgaggaacaacgatgaacgagcgattgatgacagcgtagggtctcccgtatttcacggacaatatctagactgattgtggtttaatcctcagagtacccatgccactctctaaccaattctctaatcgatgactggatgctaggtagatgttcacctctgaacggtagaatgaccgagattcggatgcaaatcgggtagcccttagccgaaaagcttccggctggcacatgtcttcatctcaattcgaccacttcgataagcaaaatctacaacactgttgagtgggtaaaagctgttcaagatatcttccaagacttcgctaggtttggcatacgtggtctcacttgcgacaagatatgctggtacaagtcccagctgaacctggccaatgaggggcccctgtcggcgagagaaaggttgtgtgtcctagccaaccgacatgaccaaggtcagaaagtcataccgtcacacaatgtacgacctttccaagccatgacgatgctcccaatattcaaggagatggattgcgacagctaagtgaccctcagcagatattttgactcgcttcagtacaccagtgcgtacatgcggtagacgatgacgctttatcagcaagttgcaagtaaatatccgaaggctgagatcctcgcctgagggggtcatctgcaaagtttggataatcgaagaatggcgatgcgggatatgcacctcagatgtatcttcgcttgtatccgacatcctactggaacccccggacgccgaagatggtgacattgcctcgctgcgtgcgccgcatgagatgtagtacttcgaggcgcttgatacgatgtgcgtcagattgcaatgacttcgctcggtaatagactggcctgtgacagcccaatcaataggacaacgagaagtgcaagatgtgtctacatcactagaagtgcgttttcctaggaaagatagggaatttctgctcgctgcttgtgcatcttcaaatgtgcatctatcaaagatcaaaggtcaaagatcaaagatcaaagatcaaagatcagccatcatgttcggattcgcttccgactgatccgtcgcgcgaaagacggccggaccatatctcgaaagccaaacgtctcaactttgcaagtgatcataaatgacttttctgcatatttatcgtattagtgaagtcgtcccaattgaaagtactcaagctggcaatcatgacgtcttggtataatcgttcgttgggcggagtctatcctgctatcaagggcgtcgacacctcgtcgacgttctccaagactggcggctcccgttcaatctcccggttaacacatcataaccgtatcggacacagcaagcccgctacgatcttatcgccgtctgacggggtcagagcgaaaagatgggaacatggatctcgcagtataccaagtcagaggcgggctttgtcgacgtatactaatataggcaagtcgatgtcgtgcgggaggtgattgcaggaagaggtgacttatttgggtatccatgcatccaacgtcttgaatctcgtgctcgacaacccctatcttccgatcccccacccacagctcttttgatcggtctaccctcgactttctatctcttgggtagcatctatccccctgccactctatccttactctttccacgaaaagctcctgccccaatgcgtgccgaaactcccgaaggccaggctcacgttgagaaactcgagcaagagatccagaaattggcgttggtccagcatttacgcgagaggacggctggaggcgatggagcagagtggtacgagtgccgtgagtgctctatcagctcgcatgtgttcccggtccccttctcactaacatcccggacctcggacaggcccggcttccaaaccgatgcacgaacactcgctcacgtcatccattttgcggggacctggaatgctggccgttcctcctttggctttcgtcaagaacgacgagtcggaagccgtcttgattctgcacctcggtcgcagtctttgcggacatgatggtatcatacacggagggatgatcgcaacgatctttgacgaagcgctaggacgcaatgtacgccagcttgtgatgccggggaagagatcggacagcgaaactgacaccatcgtggttgccaggcacttctcaatatcccttcgaatatcggggttactgccacgctcaacatgcaatacaagaagcctaccaaggccgaccaggtgattctcgctcacattcccgtagcattcagtcggcaccggaaacttatacgatcgtttggtattcagtttgtggtgattcgtaccaagttcgacaatgtcaacggtcgcaaagtcaatgtaagcggtacgatggaagatttagatggcgaggtactggcgatggcatcgtgagtcatgactccacatctacgcgagatgagcgaacgagtctgatttcatgacgcagtgccatgtttgtcgagccgagctatgcgaagtatctcagcaacagcggagtcgcagctgcactcggccgtcgaccagaaatcttggacactgctggtagactcaaagacgaaaaaaaggtggacgcataggatcatggatcgagttactagtgatacaacaatgttacaacgatatagatggaaacccacgcactaccacctagatgcactacaccaatttacgaccaaccagacttgtccccgctcttcccaaccatgatcgaagggctggacttccactttgatcccttcgcttttccggccgagtgtagagccttcttggaatgatgttgcttctctgcgttgagacgagctcgcgcgatgtctccggcgacaatgttttgaagctctttgggatctcgaaggttccgcttgtgagtggccgttgtggatggggcaatgacgctttcctcgtccgatgaggattcttcctcggaatcctcttcatcgtcctcgtcctcgtcgctgtcctcttcgtcgttatcgtgcagttctggagcgtcgtttccgttcgcgatagtcatcttggtcttcatctttcggctcagtctctcttcaccgtcctcatcgttgtcatcatcgctctcgccttcgctcgacacatcgttctcgcccggctctgcggagacgtcgttcatgtactgtatggacgagggaattttccgatcagtatcggccaacatgtagctgatgagtaccatactgacttgttcgagatcttgccacatgtttctagcgaatccactggcttcgacgagctcgtccagtctgacctttccacgtcgggcaagtatcgtcttgtcagatcgctcaaagacttcgtcgtcatccagctccggatcgaggccgctctcgggttccgctcgtcccgacagttcgtcggcgagatcggccattgtctgtcggaagtcgggacattcatccgattcgtaccggaagcgtcgacggaagaaccttcgcacacactccacgtcacggttgaaaaagctgagtaagggatacgtgtgagcgatggttgtcaatgttgcaggggaaatatcgggttgagcttactattcggcattctcgtgtccgacgctgaccatctgcgggaaatcgatcactaccggctcgaacgacttgtccttgatcatcacgttgaactcgttgaaatctccgtggatcagtccaacccgagcaagtcggacgatcaattgcatcaatttcgcttgcaagagagccggcgttacgtgtgcgggcagctccgagatttgtcgactgcaagcaaagcgcggaatttatgttagctcaccatcaaggtatccgtgactgggatctgcggcttacagagggaatccctcaacaagggacatgacgatacaatgccttccttgatcgaaaggttccggtacggggaagccatactcgtacaacacctgatgcaggaatccctacttcagcaagcgtaccgtgtcgcagacagccgagggtctcaagacgtaccttcatgaactcccattctttccttgcggcgaggcgagacatgtacatccagctggcagattttctggttccaagataatctcgtttcgtcttgatagctcggaacgaaattcgtcccaagctgagaagaaagagaaggcaaaatggttagcaatggctaaatgtgctaatcgcaaggtatttaccggtgaatctttaagatcctggtttcctcctcgccggtcgactgaatttcctgctcttcgagctcgtcttcgttccacgcgttggtacccttgcccttgatgatcgaaatatctccctccttgcccactccgatcctctgcccgaccgacgtcaccgttccacgcttcgagaacgccttcaaagcgagccaatccagacctccgtaagtcaaacggtagccatcgtctaccggaagagggggagatctcagtcatcggctcgccacggactttctgcctcaaagttgctcacatttggctccttgaacacgagaaaccagccctcgcttggcgagactacccagacatttgttaacgttgcctccagtaatcttactgagagatgcgatcaattgcgtcggtacgacctcgtggtttttcgagccagattcgacctgatttcgaacgacaccttgtgagtggaaaaagtggaggcaagaacgcagttgggacctcgtcttacagcttgcaagactcggaactcgtccggtagcacatatctcaattccgtggcgtcgagcttcatgttgactgcaaatgtcagtcagtggatagcgatgcgaggatgggctagttggaggtctgacgatgttgtgtcgagccaagtttgtaaagtcgctcagctgttgaaccctctcgaacgaaatccaaagaaccgagtagatcttcgcgcttacgtaaggtaaatcacgagagtctggtgggcggggggaggggggaaataaggacagcatgtaaaaagcacgcatcgcgatcatgtgcatctacataaggtatcactacaacccattggcgtccatcaactaaaagtctaagtcatcgtccggatcatcatcgtccatgtcgtcgtctgaacctggctcaaagatgatgccggctccggtatgcgtggtatcgtaacgtttgttatttggcgcgtcatcgcctgatccggggaacgattttatggacacagaagcgttatttcagttttcagcggggaatgacatgggatctctgactgaccctcgtgcgcataaggtattggcacctcggcccgggaagctcgttgggcgtccgtgagaccgagattgaacgtagagtcgacgtgcgcctacgaaagtttgtacatccgggagcggtcagtaacggtttaccgctccaaatttgcaaagatgggtcttcttaccttgccttcttcctgcttcgtcttcttttcgccttccgtatcggcctgaatggctgccacctgatagcccgatgcgagcgattccaaccctttgatgtcttgccaacggcatgcttccaggtcgttttccgcatcagtattcgccctttcctttccctttacactcggtcgaagcccttccaacgttcgaagcatacccttcgaagcacctccagcggctttacgaaccaagacctcggcgaccacacctttggacgtcgaactagacgaagcctctcccgacgtgtttgagctaccgtgattcgcagaagtcttgcctccctggctgcctgaccattctccaactgaagtgccgaattccccggtgagcgctaatctcaggttctcattccgcttggtagcattttcgaggatccctctgaagcgggatcctccagtcgtcccggtttcagagagatcgccggacaccgggggagggaacaggtacgccgagtgcagagagatgaggatctcgggaggatggatggtgaccgaagtgagggtgggtgtcatgctcgagctcaaaaggttgggtagcaattgcccggaggtcgatgagaggactgtcaggcgactaggagctatctcgaccaggtccttgtttagcctcgactgatcgtcaaagaagcttgtgattatttccactgacctttgagacccgagaccatcttgacgatctctttgaccatcttgatgactgcagccgacgatcgatagtcttccgccagggtgttcacatcatcgatgtaaacctgaacacccctcccaagccctttgcaggcatcaacaatccaggttttgatgtcatccagggtaccgacctgtcttgctttggagctggaaggaaatccaggtatattgttggtgaggtcaagcaccttgatcgagggggaaccggctgcatcagccaaacccagaaattccggtgaatagactgccgagactaggacgattggcgagtcgctgtgtttcaaagtatttcaatagatcggatcagctcggtgaccatcaaattcgagtgagaagaattggctgacatgcctctctttgtttctggttatgagctgtcgcaggacgggtacgcccgagcaggtcgaagcatcttgtaaaacgagaaacggttgatgcggggtttgagtgtttgctaagatggacggtagtatcgaacctggtgaatgaatcatgatgtctgggtgatatcagtctggaggtgtgcttggtatcttctagttcagaggtatacatgtgttcgactctgtgtcgagtgtgtccagctcgatgaatctacacttgcagcatgtgctctaagccgggtctacgaacacgatcacgtgattcataaagaatgcaatgccgccatcagaattacgttaccccccccccctccttgcccccaacctggcctagcctagcctctctgccttctcctccttaagtctcgaaatgccagagatcctgtctcaaccgtaccgtaccatcgtctcgacgagcgtcatgatggctcatcatctcgaatattacatctctcgggggaaacctttacaggtcaagctgacctgatagcaacgaccgagcttgatagacactccattcaaacccactcgtagctcgccttaaagccccccttttgccgaacgactcttcctcttccacgtcggctcattctgatacgcgtccagaagttcgtaaacctaaccggtaaacttccaccgtgcccctgacaaactcagacaatcccctcctaccgcctatctctcaggtaacttagcgatgaacgtactcaattcggcgcccaagccgaatgatgtgcccctggagccgggtcctaccgactcggtgacgcggatcgagttcaaccccgtcgtggattacttggcggtcggatcatgggataaccaggtcagttacggtccgcgacagagatttcgacttctagaggccacggccccggtgagacccagatcgtccgaagtctggtactaatctgttcgttccgcaatctaggtgcgggtgtacgaggtcaacgcgacgacgggacagatcacgccaaaagcatcggtgcaacacgaaggccctgctttgaacttgtcttggtccaaggtgagttgcaggcaatgcgcatgacgttctgtattgtgtactatatgcaatgcaagagtgcggctttatcgcgtctgaaggctaatactcctcgaactcaaacttgcattacaggatggaaccaagctcctcacctgttcagccgacaagacggccaagatcctcgatgttgctaccggaacatcccaggccactcagattgcggcgcacgatggcccaatcagctgtgtgaaatggttggatatgccgagtggtcaaggccagggagtctgcgtgacggccggatgggataagatggtcaaggtgggtcccatctcttcgcgagaacccccagcaacgcgggatgttccggatctcatcgagcttattcctacgccaatagtactgggatatgaggcagccgaacccgatcgcaacgattacagcaacagagcgagtctacgccctggacgccgtcgacaagctgatggtgaattcagtcgcgacaacgcggtcgggcgaaatctaacgagggcttgaactcgattacaggtctttggaactgcagataggaacgtatcgatcgtcgatctgaacaaccctggagtcgtaaaaagcgtcagtcccgtctgccagcctcacgctcgagcgcgatgctcactccctgctcactgttcagtcgaaagagtcccccctgaaaatgcaaacccgggtgatcacgtgtttcccggcgaaatctcctgccggtaatggatatgcaatcggaagtgtagaaggacgagtcgccattcagtaagtgcgttccgtaatgagccaacatgtgcgtcgcccaccaagaactttggctcgcagatacgccgaagacaaggacagcggccaaaatttttcgttcaggtgtcatcgaggggaaccggtgacggtcaatacgatgaaccggaccaccgaaactgctgtgtattccgtcaacgatatcagctttaaccggctacatgggacattcagcactgcagggagtgatggttctttgagcttctggtgagcgatctcggctctctttcttgccgcgactagtctcggtcgctgaggtcgaatgatttcttcagggacaaggatttgcgaactcgtctgaaaagtaagacagcgcagaccctcaaaaactaaagacgcattcctgacttgctctaaactctacctcttgcgttagccttcgtaccaaaggacctcaacaacgctggcgataatgtcaacaagattcctcccaccccaatcgtcgccaccgcgttcagcaaagaatccaacctgtttgcttagtaagtttctgagcggtcgttttcgcttagcccagtttggcctggctgacaagcgagccgctcccgtagcgccttttcatacgattggtcgagaggttacactggtgcggttcagcagaacctcaacaaggtgatgattcaccaagttcagcaagaagagatcaagcccaagcagaagggcaaatagacgggagtgggccggatcggagcgctatttaattcagaatcgacctcggtctggcagatggtcttgtacggcagctttggacttggccccttgtccttttcacatcaacgtgtatgaacgattctatttttcgctttccgcagactaagcatatgacaagcatgacctgaagtagacattgaacagccgagagccgactgaaatcgaataccggcctcgtccctttgcctttgcattgccagcgaggtctagaagcaaaagacctggtcttcaagcttggacaaggctttcggggcagggtagccgagaccgccgaggttgcgcctggatggtgagaaagatcgaacgtcagctttaaacgcagctgtcagactccggatcggactgacttcatggcctcgatcatgggaggaggtcctattgtgatgacgagtaagcacgagatgacttttgcctaatcttgacaggcaagacgtaccgcacagcaagaccttgctcttttcgactttgggtccaccttcaggcatgaattgctcgatcatgtcactagtgacaaatccagttcctccagtccagttctcgggagggttgttgaggacgtactgtgcagccagacccgtaaatttctcgtgatcacatctgcctggtagcatttccgacgtacctggaccttgagacggccagccgccttcctctccagacccttcaactcgtccctcagaactaagttccaataacaaatggagataagctgcagtgcacgatacccccgagccaggcgtaacaacgtacggatgtcatcctggttgacgttggcgtaaatcagtcggagctgagtcttatcctgagggtcttgaaccgaagccttgatgatctggtacatgggcgtgatgccggtacctccggcaatcatgagcagatggggcgagaggtcccggctgtattaacgagcgtagaacatataccaattagatgggggacaagggaaccgaggtatcatcggctatacgtacgtgtacttgaaccttccactgggacccttgaccttgacggtctgtcccagggtgaggagagaaagatatttcgagatgtttccttggtcgtaggtctagcgcaaaccccatcagccatgctctatacggaatgtcgaaatatgcatggtgacataccttgacgaccaagtggaagtgaccgggatcctctccatcgagcgtggtcggggtgtattttcgctggtgttcctttccgttgatttcggcggtaagactaatgtgttgaccgatgggaagtccgaggatcgggtcaggcaggagaccgggcatgtgtcctacgggatgcgggatttggaaccggtacagcgccgtgttgtgcgacagatgaaccttttgaaccaacttggcgtggtgaaagtcagacgaggtgggcaggacggcaactgcgtcaggaaggttcttcttcgaggcgaagacgagcgtcaggccgagactgagggcgacgacaagtacagcgaccttgatgtacaattgagattcgatgagctcaaagacggacacgtcgatgccggcgatggctagcacgtctcgaatcaacttcatggtggaggatccgggttgggggatttatcggctggggattagcttcatccagcaagtgatggggcagcagttcgtcgagctaatgtatcatgtttattcgttaacgagcccccagcccagcaagtccagcaagagaataggagtgagtaggtcggagtcgtctcactgagtttcgcctcgggggacatgatcgcccgctgtttccccaacaaagtcgcgcgttggtcacttacgtgatctacctcggacgccgtcggatgcaaatatcatccatcttcatcatcgttgcgtctgacctcgaaccagggtcgggtgaaatgttgctttagtgttttacggaccgagtgctatgttgttgttgtttttgttatgagtagcgctcaggcataagtcaggaatgaatagacgacttgaagccggaaatttccgctagcacgggatcgcaacaaagccaggcgcctttgttactgaagcaggttgtcacgtctgcccgaaactgaagacggcagaacaatcgatgatatcgaatggactcgaagataatcgatctaatatgctataatcccatctatatatgcatcaaaattcccatgtacggctcagaaagtccggcaggaccgacgcgaatgtgaagaagctgccctgctctagattccgatctgatcaacagctagagatctcgctcttgtccttgtcgcttcggccaaattggtgcgattgtttgcgcacgagagaaagatattccagccaagaccaaccgtctagtagtgatggaccaaaataatacattgctttagtcgatcgagttcaataccccatgctgtccctccaagtcctcacctgcgtgaacagcattcgatgcaatggtggtacgacagcaaaattgaccagctgagcgggaccgaagaccgtccatgaagtgaggagtgcttgaggaaagacgatctcgagcttttccttgacctgttcagcagatttgccttcgagaaacccggtcgccgtccctgttgagccatggatcacggataccagtcagcatttggtggtctcgagaatgacaagcgggtctaactcacagtagacagtcgtgatgaaactgccccagcaaaagatatccagtccagtacgagcaatgactgtcccgactttacttcggaatttaaccctttctaccacaccgagccatgtattgacaagaggcgcaaagacaaaggtgccgtagaaaaccgttcgacccgtacggcgaacgtcatgatcgaggccccggtgctcgaatccttgctgtgcaacgatgtcgcccacaccaaacagtgtacccgaagctatcattcgggtctgcaagggatttcgcactagtgctccgcagtacgcagaccatagtctgctagccaccatgtttgatcgtcaacagacgtacccgattgttgctatccgagatgtacggccaagggttgatgggcgatagaacgctaatgtggatgacgaaaatcgatacaattggtggaagagatatgtgacgaatcgtttggcatagccgttacgatctcattccggcggttgagaattttccaggcgatcgatgacggcgggaacagacgaggcctggattctcctgattgaattttctttgacggtttgcccctgggatcataacgacgagtgcgatacgacgacaggatacaggattgagctcgcgtcgtacatatgttttatgacaagtcaacggatcgattgactcggaagggaccgaaccgcccgaaataattcgcatccgcggtctccgctcacgtgaggcacagagacgggttggttggatgatactacagcggctacgtctatatggctacatagggcatgaatgatacttctgcgagttattgtaaagcagtacagcagtcagaccagtcattcgctctcctcgaataaaacaagcgttatcatatctgggttatccaccggcccctgtccttcttttgcgtcaccttgatggtaggaaggtcaatcccgagatccccatagtgcggcgtcacaaaggcctcccttgtgtctgcttcctgacctgtcttgctagccgtactcttggatgagaggccactcgatggcatctctagaggtcgagagaaagtgcatagcgatttgccaaggttgggaagccatgctgcattaatcttggtaacagctatattggcgtatgtaggtgtcagtagtgaacgtcgggaagtactgaatatcttgtgtcatagcttggcgtatcacttactcctcaaccagactctactcgttcgtacgacttcactgaagacgatccaatcgggtggagcgccgccgaacatactgctgctcgggtgtatgaatgtctcgtcagacacgccaacgactttgtaggcgacaccgcgggtgttctcatatttctggccagatttgtttttagatacgagatccgcccgaacggcgacctggtcgatgaagccggcgcatagaatctgtctcaaaaccttcatctgtgatgggttcataatcagctcaatgatctccttcagtctgccttgtgggcagtgtgtcgtgcattctagcaaacttgcctgcaattcgctcggtggcttgagttttgccgtcggtgcaagggtaggcacttgctgagtagctatcgacaagatctgatgtctcaattgttgaatctctttgacggcctagtgcgagatcaattctgaatcagtccgatacacgtccaggccatagctagaggagacccactttagctcgaacgaagtttcgttgacagaaggtgggcgagcttccttcaaaatcgtaagctccgatcaatgcgatcaatttgaacaggtcgctagtcccaccacccaatgccgcaaatcgctaggatggtccgtggtcaggcaatgctctcgtgccagagtctcttgtgcactcacctgttgggccttgaagaaggcacggcgcttcgccttgcgttcttccctttcccgaatgtctccacttttgatatgactgatctctggaatctctgttgatagatcttcattctccccttcgtcctctcctggctggaaacccaggctttcctcccgtagaaaggggtctcctactgacaatgctgctacaatcgcaacgatgtagggcatacagtcgtgctgattgccaattaccaacattttcgcaaatcgaggggttaccggatagtttgacatggatcgtcccagcgcggtgattttcccaccaagagttccagtcttctcgattcctcttaccattgtggtagcggtcgtcgcttcgagtgcccctagatgcgtgaggagggattccgccttcttcagagatacgcggtcgggcggcgttgggaaggggaagttgaccacggcatcgatgttcatgctcttcatttggagcacgataccttcgattggcattcgaaggatctccggcatggagaaatcttggaagtggttttcaaacatggcggatgagaacagccggtaacaatgtcccggtccggtacgtcccgctcgacccgctctttgtgcagctgacgccttcgagatccaggcgacacggaaagtctgtaccccagaggcgggatcatattgtcgctggaagcagcaacgcatcagcgttcaatcagcttcgctgtgactgtgactttctggcattgtccgagatttgactaacctccttgacgcgtccggtatcgacgacgtacttgatattggggattgtcaaggacgtttctgcaacgttggtcgctacgacaaccagacggtgtccttctggaggagcatcgaagaccttcaattgctgttcattcgggagaagcgagtataatggtaggacgtgcagcggtacttcggaagcagatcaagagagaagaaggaagaaggatgagattataaccagcctaaatggcgggcgctttaacatcgatggctgacgcaccttcggtttcttcgctgtcgattccgagtttctcgtcctcgtcctcgtcgtcatcagtatctaacgattctgggtcatgcgacttgtcctcctcgccatcatcgacgtctccggcgagatcgtcatcgtatccgatatcaaggtcttctacctcgagagcagctatgtgcagcgaactttgcgtcagacggagttcagattggctcgagagcattgtacttactgtcaatgagtgaggcagaatgatttgtcgtggaggcagtctcgatctctcccaattcccaagcacgagcggcatcatctcttgccaacccagtctgctgcgatttgtctctcgctttctgtcggtcttgtatcgcccgcttcccgaacttccgctccaacttgcggcaaagcgaagtaatttcaccttggcctgtcataaagacaagaataccaccggggggaagtcttgcatggatttttgacaccttcttgtaggcttcagtaacatagtcgttggtcgtcctgcgactgaagtgcacagtgacggggtgctgtcgagctgaaatctcgataacaggcggcgacttggcgaataacgtcttattcgcagcgaagtctgagacccgcagtgttgcagacatgatgacaatcctcaaaggctgagtagagtagcggtcacatcagttttggtaggtcgatagcgatgcatagctctctgacctttgtttcgtccttcttctctctccacaatttctcgcgcaatttggccacccggctgaggaccccaacgagtacatccgtattgactcctcgctcatgtgcttcgtcaaccaccacgaccgaatagcgactcagcaagaagtcggtcgagagttccctcaaaagcactccgtccgtcataaacttgattgccgtgtccttggaggtcgtcgaggagtatcggatctgatgcgctaccagattcgacttcggaccctggttgagctccgatgccaccctgacggctagcgagacagctgcgactcgtcgtggctgtgtcacagcgatcatcccaggattatctgaacccgggaagccgaaaccagcttcgtatagcatctgcgggatctgcgtggtctttccgcttccagtctcgccacatatgaccaccacaggatgcagaagtattgattccatgatcgtctgctcctcagccactacgggaagttgctgtcgagcctcttccaccgatggccgacggttcattgttgggcgcggcccagaagggcgaggcgcattacttgtcgaggacgtaccatctctggtcagcaaagaggtggacggtaagctgtacgtttcgccaagcggtcctatctttggcaaagtaggacccgttgaaggtccctcgacgtaaggcttgttcaaagcgagcaaatcaggcgcgagattgacgccggtctgttgtaatgcccattggcggaacttttgtcgtttctgcttggcaatgtcgctggcttctacctcgtcctcgtcctcgtcctcgtcctcgtcctcgtcctcgtcctcgtcctcatcatcgtcctcatcatcgtcttcgtcatcatcatcgtcgtccgagctttcgcccgtcatcaggttgtctgagagttctgagccggcgtcggtcagaccgcttgaatctatagagacttgtgagaccatgtatccgtcctgttcttcatcgctgtcgggttttgagccagtgtcgtcgtccatctcatcgctatcttcggctgcagcgtctagtatagcctgtctcttcctcaacagccttttctctgctcctgacatcctggtcgtctatgaacagcacgcaaccgcgggtcaacgcagaggtttcgaaaagtggtcagccgagatgctcaccttgacttttggtgctcgtacgacaatcttgggacctatcactgaaccatccgcggcctttttcagcgcggaaccgaaaggcaatcctaatggtgtggaagactcgggcttgttgctttggaccggtaaatcttcttccacagccatagcaaggagtttctccaaatcagcattctccgaatctagaatttgttggtccgattctgcgccagattctgtgctataatccaggtctgaaccgatctggacagcagtattgaccaaattaccccatttgtcctgtgtacgtcggccaggttagtctgctgaagccttcgagcagggagattatcttaccttctgggcctttcctttcttaggcttcttcaaagattgctttttcggtggaccgggaacctcggcggtatctccttcccttagatgaacatcgagtacgactccattcttttcggctttcttcaggcgcttcgcttgcctggaccctagatccgcaccgtcctgacggtcacctgtccgttcgacatcgtcctcgtctgataggtcgtcttgatgagtgatgccatttcgttgagctgttttgcacatggctcgtctgacatccagatcttcacgcttatccactctttcttgagcactgagaggatttgtcggaaattgtcccagggtagatgtcgacttcaacctggaagcgatggaagcgatagctgaagaggaagggccagactcgccagtagccccggcgaacttgtaggagttcgcaatggtctccaaagattcgagccgcgactcctgtttcaacttcttggcctgttgataatcacatcgcttagtcaagttagactggcttcgggacgctgcccaaaccgacttacgatgaacgcgtccaggcgttttcgcttcttcgagctaagttgctcgcccttctcggacatctcacggcgcagagtctctattctggattgtctttccgtttctttttgtccgggtaagatcatatccagttctgtcggagtttccatggtgtgatcttcggctgtaacatcgtcctgagcgatcgtgctacgccgacgcttcttgtgtgctgatcctcccaaggtcgactgccgcgctttggcattgtacctttgcctgacaggtggacccatggctcaatacaattcggtcgttctagtctcaaattcttgtagtgaagccgtcagagcgtggtcaaactagactcgatatagcgacacaggagcgagccttatgaggtcggtctttccttgtagagcctgaaattactgtgccgatcgatggccggggatgcggatgcaaaatcgtttacgggattgttgcaattgacccgaggctcgcgcttcttcctcagcatttcgttagaagtcgctcgttacgctcttttaagcatatgtgtaacaaaaccgtctaacgtataatcatactgggttgcaatctagtgaccggctccacatagctagtattcgccgtttgacaatgaccgttgagattttcagatcctcgcgctccgccggtgggaggcaaatacaaatacaactggctcagacgtcctcccaccctctgtgtcgaaagtcagctcaccaagccacatagcccacccatacgtcctgtgaaacgcacccgaccctgagagcgtatgtggactctccatccggctgacatggactgtccacgagtttcgcaattctttcctcccctcgaccttttctgtgaaagcagaagatggaaatattgtcaatctgtgggcggacaatctgggtgatcgcgtaccgaagctgtatcctagtagcagatctgtgccgtagcattcacttcgtgagcattaaatagcgtctcactgcagatgtctcgccgcttcaatacggtcattgggtcacttacgcgtgcgccaggatgtgacttcgttggccatatatgggtgtcagtgtcagtaaacagcatctgccgtcgacgaaaggcctgcactagtatcgtaccctccgataggtttcgcgcttggcccggaaaagattgcggtcgctccaggatctgcttgtacctggatgatcggttcatctcagcttcaatttgccgctataattgccatgttcagagacgacacaaacttggttggtcattaagatggcgatattctgagaaacaagatcgttgagtattcctctttgcagattgagccattcctcttgtgacacacaaactcttccgccattttggctagcctcgataagaatccgttcaatttctgacatgaagtagttgcattaggtcacgggaccggacacgccagtcgatatgcctcacttgctgtctttcgctcagttcccctacccaatgccatcgtatagataagacgttagccctgatacgaaacaggtagcattgtttctgtacctctgccgctgaagtcggaacctatgcaaaatcgaatggctgacatgagtaatgttcactgcttgactcgcagcggaacttgcggaataggttcatcacggaatcgataacgagaagcttgaaagtgcgatcttcaacgaatctactaggaagatactgtgagtgatctcgaaggacgtgaaatcgagcgtggccgacctgcctctgcgccagctcgaacagcatatcgtgttgttgctcactatcaacaaatgaagcttaaattggctcacactccgtgggacacgatgatatagcacgagaactcacgaagagtaagctcttccgcagatgacatttctatatacccgtagctgtcggagtcagtaattggcgctcgagcttggatgctgacctcacccggtagctgcagcagtgtcaacaccaaagcgatcgcagatggcgttgagccgctcgggacggaacgtcccctcagtatctattcgtaacctgtcagtgatcatcaaagatagtttaattaatgcgctaatacttaccgatccaggcaaccttacccccacccccacccatttcaaggggcagttgagtcctatcatctcgatcgtggcattcgggtcagtctgattgtcaaaattgatatttatcgtattgtcacttgcgtaatggccatggtatgagccaactgggtctatttgattgctgaatgtgagtttatgggggcatgcccaaaagacgttttgaacacaccttgccggttccttaaagcaacaacattgaccggttagtgaacgtcgtctgtcagggtcggaaagacatttctcacggtattctccgaaaacttcggtcaagctacccgtctgaacgcctcctaggtatcgccttgctagattaggttgtgcaaaatatacaatcccatcttctgggaacccaccacccaacatcgcgtcgaccgttttgcttcctgtagtgatcatcacacagcattctcgtcgaagtccgatctctgccgcagtcgcgaatgtcggaggcaacatcttcgccgcggcttctttcagcttttcgacctttgcctcggaaagccctttgattttgagaagatttcgacgggttgtttgagagacggctagaatcgtgcagattccggtcgctttgagcttgtttatatcttgcacgttgataccttgggactgcaattcgtccacactctgccaggtagtgtgcgattgatcggcatcgggagatgagtctatgtctttcttgttcacgaacctcgaaaccagaaatgacgtcctgatgactcggtgccttgggaattagatacaaaagagaatctggtggggtttcgcttcggcgacctcacctcgtcctgttcgtgattggacatttccaaaaattcactttctgtacgaaagatcttttcgaacgctggctgtagcctcgatagaacgtgagaaaggaggaaattccatgagcccctacgtatccacacggtgacgagggagactcaaaggtacttgcagacagacgagagctgagggaatggatgcaggctcgattggctgactgtgatgtgttgctcgagcctttgtacgctgaagcaccggtctcactttgataaaaaggctgcactgttaacataaagtagcagataggctgttagctgttagagttggggaccgggcttgtcgaactgcctgatcgagttcttgcttcttgatcaacaacatgatcagtggccagtgtcgtggggcgtgatgagcggatgcaattggatttgcatgcatgccgaaagtgaaacatgtcatgccgtcgtcgcccccctgtgtgggattcgatgaaagcggacattgataaacaagattaatgtccgtgcgcgcgtctattccattgccatctctgtccgctctttcctcgacaaaagaacctcgaactcactacaggccaaagaacttacaaacgacttccgcttgatatcattactctcctaacttactagcttcactagacaaaaatagcagaatagaagatgtcgtcaacggttgattctcaaaggcccacctcgctggctgaaaagctcgctgcctcggccaggcagtctcagcaatcctcgatcaaccaggctggcggagcgcagggcaaagctctcggttcgcgaccattgcaatctgccggatctggtaacattcccgccagactcgaggaagctcttgatgtcgagggcgatatcccaatcaacgaggttgaagttggtggtaccgtatgtctcgatgtcgtctgtacgcatgatccttccgtttggcatgctgatccggtcatctctttactggatcgcctcagcctctcctcaagattctcaagcactctaccgaccctagtgcttcaaactcttcttccaaccccagtcctgtagatgccgtcggcctgctccttggtttggatcttagcggtgttgccgagatcgtagacagctacccgctgcccggaggtgttcagggggctttgaacgctgttggtaccggtgctgagagcgaaaagagtgagcatgactctgttgtctcttattgttcttacgcgcccttcctcaacgacgttacacttttgcagctcctttcgcccaaaacctactccgtcacctgcgagaagtcgctcttctcgattcgccgatcggtatctacctcactcttcattcccccactctattctcgaccctcatttccgagaccttcaacccctcttccacgatctctggaagcaaggaccccaacaaccagaacctcgctggtcttgctcctggcagtggattcatggtaaagggcatcattgagctgatggctgccgtcgagaggatgggaggaaaccgaggctcgagcggaaagggaggcagcagggctgtgctgattgttcatggtaagcgagtctctctgaggcacgccgagccaagctcatatcctccccttcaccgattacagacgccgcccgatcctctgctggtgacgtatccatcaaagcctacaagttttctgacggattcgcagccgctctcaggaagcaaaagtttgacacccagaggtaagtcaaccctttgcaatattctaggtactatgtctgacctgatgatcgcggcaaaccagcttgatcgagcaccgactggcgccgtcaaccatcctccagccccttaagctccgcaccaaaaaccctgctcttctcaatgccctctttgcggagatgtcgaccccagccgacgccttgccttccctccgagagaccaagaacacggtgctcccctccactttcctgcccctccaaaacaccactgccacatcgcttcccctgtcgctcagcaacacgctctcccagttgaccaacttgtcgactgagcagaacaacttagcttatcagctgcgacaagtcggacgtgagaagagcaagcacgatcaagccgtgcaggccaggcagcaggagaacgagctgagaaagaagcaaggactcgctcccctgcccgatgtcgctgagcctcccgctcgcaagatccaagacccgagccgtttggatttgatgctgtgtctcggagccgtagacaacgccgccaagggcctcgctgctgaggctggtaaaggcttggtaaaagcgttcgcaagcggttgagcatctcgtatattctgttggcgtgtatgttacgcctttaccgcgatgtcgtgtcgtacatatgggtctcgctcagtgatacagatcaagcgtgatcgatttgacgaattcaatttattattacgcttcgccaaactgctgagtcggcggagcaatccgctcccgaaacaacgatcgattaacgtgtctcgtacggtaaggcgcgggcctgttgcgagtatggagaaacttaggctgggcttgtgcgatatccgcatcgatttccgctagatgcggttctttgtctttctctcctacatgaaatgacaagcattgagctcacaggcagcatcacggctggaccgcagatcatcagccagccgaccgcgaagaagatcggatagtcagatagctctgtacaacgaggatcgtaatccagataaagacaggagatatcaagcctggggcctgttctgaagcattgccatgaggttgctggacattgcgtcaggcgtcatggcatggtttgggggacctggcgggatgggatttgcgaatcccagagggtgtagatgcatttgggggattccgtggccaggaggaaagctctgcggagggtaagggctgaagttgggaggaggcggcatgttcattggagggaacggtggaccgggcatgggcatgcctcgaggtggaggcatgcctcgagggagatctcctgcaagttgccaaaattgggcctgctgctggatagccggggtaagatccggcatgttcggccgaatccgcggcgatgcaaatattccagggggccccccaccagtgtccattcccggcggacggatttgcggcgttgcgatatgaagcgaaggcgaatccagatcatgaggcgtatgatggctcagaggtcggtgttcaaggttgaacactggattgatctcttgcctgtgctgctcaggtggcgattgagctactcgaccgacttggtaggtatactgcggaccagacatatcatgcgggaattctcgcgccatctctgagcgcctttgctgattacgcgcttcgtgactgtttgcaggcattgagtgagcgccctgaacagggttgtatttcgccttttctccgtttaacatcgcagcaaggaatcgagacccagaattgggtgacaagggggccgcaggcggcgatcggatcgcgctggcagaagtggtcgaagcggtaggaagcagaggtgactgcgtggtttgctacgagtgcaagtaacaggatgtaagcacacgagaccagagcctgtgatcggacaaacgccacgtactgcagatttgagcattcctagcaagcgggccatatgatcaaccgattggcttgtcgtctcgacgttgatgttgcctacgggcggcgattccgctttatttgaaactggaggttgtgttaaagcttgcaagcttgggacaggcactgcgagggctgaggcaggttttgcgtgaggctgaccggtcttggccaacgaagcgggcttgattcccagaagggctgcgaacgcctgcgtcttatctatgacaggttcagtgtgatcttgcctagttgggctggccatatgtatactttgctgaggtgatggcacctgatgcgcggcggcgggcgaggcagaaggatcgaagaagcgggcaaatcggctgcctttcccggtcggggtggcaggatctgggacgctcgcaggcgtaagatccttacgtgctttggctttggcttgcggtaacaggaatgatgccgaagccggccgtgtatccaagctcgactccatgccagaggcatgagaaggtgtgaggtcggagaacagccccggcggctttggcgtagcctcattaaatatatcttgcgatcggccaactgcgatggtgccgccggatgtgttagataggagcgagtgaatgacgagatgaagcgcgactgacggtgatccaatttacctgcaagtcggtcttctttatctttcatggcttgcctgtaggcagcgatctcgtcgagaccgctccgagcaggtcccgtttggggttgcttcgattgatccaggtcggtcgcgctcggagccgtatctgtcatccattctggaacgtgatgctcatcgttgtgaccatagcgtcgagcgggtattccggcctccctgtcgatgttgccgctagccgtccgcctccaggtggtgtcagcagcccttcttgcactgtgatcgttcgatctatgctcccgaggctcccggctgtcactttgcctcggagctcttctatcgctctgcaaagtttactgttagcgagaccatccttgcttatcaagattccaggacggagacggacttcatcaccggtctggagcttcaacgcgcccttcattgcgaatctgcccatgatggtcgcatcaccctcagttggatccttcgcatctgccttaacccatgatctatccttccgttcaatcctatcaagagttctacgctccggcgtattggtatccgattgctcttctgcggcagtcaggccgcggcccagcattccgctgtctccccgccgggctctgtcggtgacaacccgtcaatgctgtcacatggccaggaagatcgacgtacgcacagatttcgtggacgtccagagctagccagtccccgtccaaacgatagcctctcttccccatcgttgatctctcctggagtacgaccgcttccacgtttgccgttcttgccgggagtcattgtcgcatctcttcctgcttctccggcgaagaacggggattgtcgggatcggtaaccgggagggtaactctcagtcgtcgttggtctacatccgtggagaatgcaaagcacggaagctcagctagtcaagtcggaatcgccgagcgtaaataacaggacgaacgtgaaccactcggatgagggagacattcctgaaggcacccgaatcagcggcgagtctttgagagccagtagttggactctagtataatatatcttgattctgccacgcttcggaaacacatattcctccccatcttcgctttcgagttcggcgaacatatcctcgactggcggtgatttcattctgcctgcttgaaaggacgtcgtgcccaacgtttctactatccgagcgatatcttctaatatggcttgcgaaaggtttgcggattgtcgaccggtatgtcggatgctgctttgtgcagtggaatttatcaatctgatgagaagagctggtaggcctgttcaagtgcccacaagaacgaacgagcgcaacgataatatgatgatgaatgaaagtgatgtcgtgccagccaaggagatcccctttggggtcgaccggcttctgttgccgtaatcagggtacattctgcttccgaagagcgcttccagcgagggcaaggtcaggcgaggcagaggtcgacaaatggcaatttgacgtctatatacatgtatacactgagccgtctcaaatctcttaaccctggccggtatacctcttattcgtccatttctgccaaagatccacccacacctcgtattctgtatcggcattgtccccctcacccaaaccaaatgcctcaccaacgccttcccctggacccttgccaaactgggctttaccaccggcagtgatggcttcacacaatgcgaaaaggcctggctccagttcgcctcttactgtctgcggtagaccgcagagcggatcagccactgctctaacatacgccacgagcacgccaggggcatgcttcgataattggccaaccagactaccgagatctcgatcaagctggtttcctggcgtcgattcatttgtcgattttccccttcgaatcgtcgatcttccagtcaaggtcccaatagccctggcaaaagctgacgcttcctgatctctgaggcaatcagaatcttcgggacccatccactttggacgccggctgatgacgatgcttcgcagttttcctgagccgacgctggctcgaggataagcgaacaatccaaacatccgcgagtagatcctcatcagttgaggaagtatgttcaagatgagatctctgcgatgccggaccagcgaattgcagatcgacaagaccagagtcgggacctcgaggtttgtttgagcggaactggcgctcgacggtgctaaagctgcgaaactagccaaggcgatttcgctggcgtcttgctcacttaggctgacgggctgtgaagagacgcgtgagctgaaccgcaaatccaaaagaaacgtagcacgcagctgacctttctttcgctaatcatattcatgatttgcagagcttgaacgcataggtcggtttcttttgagatcgcaatgcaagcgtggagcagggccaagagtctactcagatgttgcttgaaaatcttgccagaatctgcaagagcgcatacgtaagggggctgaccggggactaggtcggaacctgtggaacgtactgttgatctgtagttctaagagaagtaagcacgccgtcaaagaagctccggcgatagggcttgcggctcccaagggagtgcaaagagtgtccatcagggtcgaaagcaaactcccgtaagtcgccgaatcgattcgcgaaaggctgcgtctatacacctgctccatgaggctgtgttcttgaatgcctgtgaagcacatggtcaattcattcagctcgatagaacgtctgagaatgaacttgtagtgtgtagccgacaatcacctgatgagcggacgaatgccgccttgattgcgatccaggctgccagccaagtttgcatgtcggtctgagtctggtgggatgaagcgatttctatagctaaagtctccagcgccgggatcgcaagttcaaccacatgcgagctgggtgaggcctcgccatccgcaagttgctgaaggcatgagtggacagcgcgctgtgccaagcctttactgatcctcgatacagacaccgtatctgactgccgccatgagctgtatacggccagcgctcggtagatggaaagaagttcctcagtcacatcgccgttttggaactgcttctcgtagactcggcccattttacgatatagttcatccaagctgccaagtacatggctgggtagactgcggcacgaaaggattagacggatgtcattgatgactggtcgacttgacactcacctgtcgggatctatcgtcaacttattgggcgttgtcaaaagaatagcacagatagggccgagattctgatgtcgattgatgtcgttcaccaacttgacgacaagataggcgagcaagcctgagttcttctctaattttgcttcgcgcagcagcgagctgtatattcaatgagtcgcttcagcctatcgttagatagagcgcatcgatgccgaacgaacctaagcaattctgaaaacagatcgcgagtgctctcatcggtccgcgttgaagattgatatcgggacttcaacaagacgtcaatgttgtccgtttcctacagatagagatgaactgtcagcatggatcagcgcggttgagggtcattacgactttactaaatttccgatatagcccgtctcagcgatggtccggctcaggtatcgtcttaatagggcagactcctcccaacgctcatccgacctcgcaaaggcgatgtcccattcgtatgctttggccatgatcacgttacgcagattgcggctcagatattcgacaggagtcagcatcaggaaggtaaagatatttttgatgacagacggctgaggcatatcgactatcatcaatgccctaatgtggcgagagattgcggctttgaaaagaaagaacgaaactcagcgcgatgcgaccagcattttttcgcagagcatgctcactctgtaagcgtggcatttcccacaactcggaagaacacatgacgcgctcaatcgcacgtgatgcgcaaaatccgccttgttcgaggcgactggcctttgcaccacggtgtacgagactttgagcgaaaagatcgacctgtctatcagtcgcataagctcttagcagaggatgagacgtgagtgatagcgatcgtagatagattagtgctggccgcgacgtactcgatgaccggtaccccttgcatcgcgatattttgccaaacagccgcagacaaggattgaccttgcacttcgcctgatagaccggaccacacggcattggagtcatcggctggtgttaagaaggtttccatggctatttcgtctgtttgaggaaggaacccaagcttctccgccgattcgaaagctgctgaacactgatttcaacaggtcaattcgcaagctctagttgaaggaacaggtgctcaggggaccacttactctttcgtagcgcaactctgcagcggcctcgtcatccagcgtgtaaccggtaagtgcaggcagctccacgttttcgacagtatccttgaaccgggtacaggatctcagcaatcttgtcaagccagcgatctgcattttatccgcccaggtccggctcggacctgatgaggcgtcagacaaggtcctatgccatgcgcggtgatattgatccaccgtcggttggaccgatgcaaatttgtcgacttgactgtccaccacggtgtcgaataagatggaggctaaacgggatagtatcccgaactcggctgcgaagccatcaatgctgctcgaaggtactgctgagccgtcgttgattcgtcgcttttttatggagccttcagggtgagtctgatccaaacgaacgagctcgcaacagcgctctagtcgcccggagatattgctcagcatagtaacccatccgccgctcaagccacctcccgctagggtatcgatgatgatgcgttcgtatttctgtcggaatcgggaagacacaagcggcccgcagcaaatgtgtctgtaggtagatcttgcgtctccttgacgcaaagcatgcgcaacagagtcgcataggagttccagcaagccggaattctcgtgcgtcaaggcgtgatacctcgtcaccgtaagtagcagcttgagagcacgatccgaattagaaggttctgcaacctagaggggccagtgtttcagttacgcgttatgacacagccgaatggcgacaagacggttcctgaggctcactgaaattgcgtgcgccaaaacatttcgactgcacgtctgcatgtccgatacaatctctgcgctcagttgcgtagctccatagtccagactagcagcagtctccatcacttcgtaaatcgccccggcaagagctgcatctgccccttccaggtccttggccgtctcgctgacggattcctggagaagggacgaccaagctgtgtcgccttccaggtatccaccccatgtctgaacagcttgccacacaagcgcaatcgcattgcatcgagctgcctggtccgaagcgggagatgcgatcttgttgatggagtcgagcacgaagcgagtgcattgtagtaccgcctgacgaacccgcccggatacatgcacatccagtggaactgagctcctcgatgaggctgtcggcgggaagagcgcgtatcggttctgatgtattgatgcaatgaggagagcgaggtaccgaggcaggaagcacagcttcgtctgaggcagaatgtcgtgatgatacagaatagtggggagcaggtacgccgtcgaaacgtcctcttgctgcaaaatcggtagcgaaaaagcaagggctttgaaaggatcttctatggcatgccgaatagagatgttggcctcccatgccgacaacagagctggcgccaagggttgtatagaggaggtgatctgcgagcaacacattccttgatcagctacgttttgagccgatgccgatacgattcgtatatacctttttcctgttctgcgcgacatccaaagagacgacaagttccgcaccgaccgctctgagcagctgttccactgaaacgaggcattctttgatattctccttatcgatccacgtcaacatgagtcctagaatctcgagccatccctctgcctttcctgctgtggcagatcgatcctctctgacagtcgcaagcagagtacgacagcttcgagcggctgcgtccacgagtcgaccgagcgattgtaccttgtgaacattggcgcagagcgtagagaaaaccccttggagtatggtctgcacaggagcactgatgaaggttgcggggtctgtaccatgcgagatcgtctctagcagatcgtggtaccgataatcaagcagtgggttcgaggacgaactggatgatgcatgttgcaaataatcagcgtctccatgtctttccggagctacaagaacatcctcacagttttgcgcctcgaaccttgacaaactcttcgattacccaatcacggagaagtgactgtttcctatagagaaataattcttccgacttgtgggcttgccaagctatctcaatttttgacggccagtccggttgaggaggatcccgcggagctttgagtgctttgatcaaggacgagctgctttgcaggtattcagggagttgagcggcatcgaccatgattacactgtcgaaaacgagaccagggtgcagcaaactgtgagttgactacgtgaattatacggtgggtgatctcgatttgataatggtttgcctcgcaggatattgcagtccgagcaggtgatgcgtatggcacgaagcagtgaatcgtaaaatcgtgcaattgtgccacaacccccgagtcgagctgaagcttcggcgagatgttcctcccatattattaattgtcgatcacgtgatcgcttctgttctaccccgctacaccgccattcctcctttcacgctaatgaatcttgttgttgttgtttccacccaaaacctgtcgcgcgttgattgactcgcccgccgcccgtgactcatagggattcgagtggcccgattgccgagtagctagtagcgtgtcgtcgttatcaccatatcattagatcaccagatgaactggcatgatcgctgctctgtatgtctccttcactccattcgtgcttggaattatcgctcgctcataactgaacattgcattcagttgcactaccaagaacatgctttctcttcgtgctcgaaccgtctcggcatctgtcgacctggctttcagaaatgtaatccaggctcgatgtctgaccatcccgcccactcagcccaagcaaaactcaaggccccctcgagcgaagcgcatcgattcatcgcaggacaagatcgaacgactccccgcttctagcgaaacttccaagccaatgcgtcgcaccccgcaatatatccgccgcaagatagttcctcgtctcgccgacaagccgatgtccttgatgacacttgcggatctctctccagctcagatctcgaccataatcaagctgtccttggcttacaaagccatcgctagcgaaggccacgctcgagatgtcaggtctcgcctggaaaaggaatccgtcgccttgatcttcaacaagaggagcacccggacccgggttgccagcgagactgcaatcaccgctctaggtggaagcgcattgttcctgggcaaggacgatattcagctcggtgtgaacgagtcgctagaagatactgctcgaatcatcggtagtatgacggcgggtatcatggctcgtgtgggtgaacacgtggaagtcgaggtgagtttactacagagccttcaaagcctcgtaccgttcccggagctttcacctaacaggccttccgctgaaatcggattccattccattggtaggccctggccgacaaagcgggtgtccccgtcatcaacgctctgtcggatctatggcatcctacccagattctcgccgacatcatgacgatgtatgagattatgactcccgccgatcagcatccgctttcgaactggaacgagttgaggggaaacaagccggagtatactgccatgcagctgaccgatcaaatcgatccgttcgccgcactcaagggcaaaaagatagtctgggtcggagatgttaacaatgtgcttaacgacatgttggtatcgctgcctcggctaggtatgaagatggctgtagcggctccgcagggatacgataaggttgaccctagggtctggaagagggtgtgagccacttagtacaaggaattctttgcaactccgaacctaaagccgagtgcgattcttccttccttcagtgaggaagctggaactacagatcagattctcatcacgaattccacagccgaagcgctgaaagatgcggactttgtcgtcaccgacacttggtaagccagaagacgagcaggaaaggtgtcgagtccttctgacgttgcgatgtatcaacaggatctctatgggacaggaaagtgaaaaagaggcccgcctgaaggctttcgcggggttccaagtcaccgagaagctgtgtcaggaatctggcgccaaacccgactggaaatttttgcactgcttacctcgaaaggccgaggaggtcgacgacgaggtcttttacggacccaggagccatgtgttccgagaaggagagaaccgcaaatggaccatcatggccttgttcgggcaagtcctgacgaaccatgcacacattatttgacacaagctgatcttgcccacatctgcagcaccttgttcgcaacttggacgatttagtatggcaatcgattgcccgttggcacaagcttgttatatagcgtaaattgtacgacaatgcagactggactatgcgtatggcatcgagttcactgccattcttgccaccgctctagaccggtaacgctgacactcgcagcaggttgctcccaagcgaccgcaagattctcgaccgcttgttccgccataccgacgcaatcgttcacgccgacaccaccgtagccgctgccaagcagcaccaatttgccgctccaggcggacttgcccatgtgttcgtgcagctgacgtaatcgatgtccgtgtccaatgaggtaggttgggatacagtctttcgatatatgcccttccgccaagactggcggagggatcgtggggaaaacctttttcaagtgacccattgctttctccgctaattcgctggcctggggcatcggaatgggaggagtgtccggatcaaacggatcagagggataactcgaccaatggggtcctcccatcatgacggtcaacttagtaaagtgagaagcgattaaaggcgaatcttcaacgcccgtcatcgaggtagaatcgaaaatgactcctatgatcccgtcggggttcggattcttctgtaatgatccgcctcggagaaagattgacgaatcagctgtacgagggacgagatacccaaagcccggagggtgtatttcttggggaggaaccgggaacaccaaattcaccacgcccacagacgtagctgggttgtaagatagatgcggcaggctttgctgatcggggagcaaccttgcgagggtcgccggagagagggtagagacgacaaaagaagtctcaatgttcgcaccttctgccagtgttaactacagtgggcaaatggatacacgtcagcggatggcggatcctaattggagatcgccctgccactaacccgacaaccatcaacagtatgctccacgcgctcgatagattgtccggtttgaatttcgacaccaagattccgaatctctctttctagtctcttcgttagtgtttccacaccgccgcggatgccgtagatgctccaagtttttctgcgaacattcagatcgtctttcaaggcgttccacgcttcttcctccgcccttgcaagctcgtgtcgcttcggagattttgaaggtctaagtagacctagtagcaggctacctctggcttgcaaagcatcccacaggacgggaaaggtggagcggacggaaagaattcgagaatctgccgcgtagattccgtgcaccattgaagatattagcgaatccgctatgcgagggccgagcgtgcgcctgaccatgtcgtccaccgacatatctctgtctcggaattctggtccggcatcccgggaaggattcgtggtcctgctcgggctgggtcgacccctgttgcggaatggttcgaacagtacgctccgtagaaatcctttgagcactcccgatcccctgccatctttgcggaaccacaaagtcatggcgtccattatactggacggcagcctgacgagcgcgtgatttcgaagatcgaggatgaagcgattcttggcggatgggtgatcaattgcgacgggcaagatcgcattcgacagaccaaggtcttgaagctagcgattgaagcatgcaaatgaacagcaagacacccatatgagacacgatctatcgagcgagcacagcacggagctaaactctctcacatacgagtttcagcatttgggcagctcccttgcttcctctgggccggatacttctggggccactttcgagcacaacatcgatctttccagtaacattgagatcgtctttgaccccatccggcaggtcgatcgatcttcggcggctttgcacccagcctcccacacgagatgagttttcgagcagagtgatctttgcttctggatgcaagattgacgagacatttccgcgttgaccagacgacttgaccagctgtgcgagtcgataagccgaggtcagaccggtcagaccgcctcccaatacggtgatatgcttgatttgccgtatggccgaactcatcagccggattcgtttgcgaacctgaagcgatgtcacttcttttgcgtcactgctcgattcagtcttttgatgtccaacgctgactgactaacagttcctaccgcttgattcgagattatatgtccgcgcgtcgatacgtcgaggacgctgtttgtggtttttatacgatagatcccgtatatcctagagatagggtgtagcgtggtggagatgcatgtaattggttataggtagctaatcagatctcatatcgaacaattaggcatgatggcgttattcatgatgcacgatgcatgatggaagctgaaggctgtatcgatatcgatatgatcgaacctacctttgctcgaaggctcggggcttgcttgcttgcagatgagatgacggcatcctccgcggccggcgatggtcccagcgacgaaccagcctgggcgcggcgcggctcggctgcaggctgatatgagggataggatgcgaagtcttaacgaaagatggccatatctcattcactaagatcagtagaccaccgagcatccaggccaacactagcagaatctactagctatcagtcttgctcagagtcgtgcttctgactctgtcaatatttggaacgggctgcacgaatcacactaggatctcagtccagcatgccggacatgtcctcacctacttcggacccggccggaaagggattccaatacgcattggacataccgcccagattattggttttgcaagaaatccagcaaatcacctcttcgatgcgacgatctccccgatgggcatcgcccagttcggcctcttcggctgcttactactcagccacccaccggcggcagacctcaggttccggtccaacggagatggttgagcgatctcttgggactgcgtcctccaacgaccggtcgtctgccagcaacaacgtcggtcgcaagctcgaaccaagttcggcttccggtcactctgtcgatggcagtcccagtatatatgggaaacgcttggcgcaaggagaaggcgaggaaatggagcttctagctgcctttgtcgggttgcgaagaaggctttttgctgtagagggtgagcttgtcatttgaaccgcgagctggcaaccatattgagtattaagctcacatgcacctttcggctatacagaattaagggatatcaatccgctcgatatccttgcacctttcctggcattgatcagatcaccccttacgtccgggccgatcacgtctctcgccctgactgcactgaactcggtgtgttataacgtattaccactataccttccggatcctttgcccaaactatctccgacgttcttcgctacccctccaagaccacaaacacagctgcaacttgcgctagcagctacaacctccgccttagctagatgcagatttccgtcaagttcacctgcgcaggacgagctcgtgctcagccgcttactccgagtcacggagactatcatctctggccctctggaaagggacttgacggatgaaggcgtgtgcgagatgctagaggtcggcttgggtatgggaggacgagctcggcttggaggtgagtgcacggagacttgcgacttggagcagacactcagctatctttatgtacagagggccttcgcaaaaccgctcaaaataccatacagtcaattgtgcaagcgggctttactaggctcaggtatatggacgtctcagccttggatatccgcgagcctatcggtgatgctgtggcgattggcgcgcgatccgagaaaacaaattcccctcttagcgaagagtctggtcaagttgaccgtctgcgaacagacgtcccggaacagtctcctcaagccgatatctcacaagagggtgaaggtctcgctccaactgttacttcaagagaagatgtagcttctaagtcaacttcgaccgacgagcctagccatgctccacctggtatgtcctgacaagggttaaatccggatcgttcgcttagctgatgttgctgtatcacgtcaacatgagcagctagttttgtcccctacggtctgccgaccctcctcgagctgctgagagtcgtcacgtcacttctcgatccacttgatctttctcacacggactccatgcggttgtccgctctgggcgtcctcaattccatactggatgttggagggaaacaactgggtcaatgggacgaattggtggaaggcatgaaaaacgacggatgtcgttatcttttccaggttagctggataccagcatgacgccgatgtgtcacaatcactgaaatgatttttgacgacagctgatccgttccgacaatccccaaatcctggcctcggccctgcggacgctctcgacattattcacgactttattaccacatctcaaattgcaattcgaattattccttactttcttgatcgatcggttgacaccatctactccagtggccgtgccctcgcatctcatgcacgttcgagcgcctcgtcggggttcatccaggcccagctcgacacaagattcggagaaggagaggccatcgacgccgaagtcgaacgcgcatctgccttctgtggccgccgacaccagagaactcatgctggagactcttggccaactcatgctcaatcggaacttcatggtggacctctgggtcaattttgattgtgatccagagagcgaggacgttttcgagaggatggtggatttccttgcaaaggtaagccctggagctagaagatacgatgggaaaactgtgttctaaactcgctggaaaaaacaattggcctgtacagggcgtgtatccgtccggactaggggtaatatccagccacgtccccgatcacctagataacagtcagcttttatgttttgagggactgatctcattcgtggaagcgatggcgaaccgaaacgctcaggtcagtgtttggtggttatcagcgtgctcaagcgttcgctcagcctgcctgttgtccggaacaggagtctggaccgtggccattaggtttgccttccagcgacgatcttcgacatcagaaagacaaaaaggcaaaattgattgctggtgcgacggccttcaatcaaaaaccgaaacgaggtgtagcctacttgaaagaccacaacttaatcgaagattaccacactccaaccgacaaagacgccactcgggcattggctcgttttctcaagtcatcaacgaggttggacaagaagctgcttggggaatacatctctactccggacaatctggaacttttgaaggctttcatcggcttgttcgacttcggtgggaagtcgatcgctgatgctctcagggaaatgctcgaagccttccgtctaccaggagaatcgcacccgattgcccggatcaccgaggcctttgcggatcacttcttctccttccggcctgaagaaatagccgatcaggaagcgacatatatccttgcttactcggtcatcatgctcaatacagaccagcacaatccgcaaaaccggaaaagaatgacaatagaggactatcagaaaaacttacggggagtcaatcatgggaaagactttgagccagcgtatctggcttcgattcacgattcgatccgaaagcgcgagattattatgccgcaggaacatgtcggacaagctggcttcgactatgcgtggaagggtctgatgcagagaagccggaccgcgggtctagcagtgtctgtcgatacatctgcctttgatcaggcaatgtttcaggtagcctggcgtgcgaccgtcacttcgatggcgtctgctttcacgacaagcacgcaagacgaatacgtgatacaaaaggccatcgtaggcttcaagcattgcgcgacattggcaaggagattccatttgccggaggtcatcgatacgatcgtcctgtctcttgcgtatgctactgatcttttggacgaaacggatgacggctatcagccggccaaccatccgattgtcaagacagaaacgggctccgtcacagtgtccccgttgtctgtccgatttgggaccagtttccgaagccaattggctacggtcgtattattcactattgccaatggaaatggcaatgctattcgcgacggatggattcaggtgagagagccggcaactcggcagtaaaagatgctgactcctgttatcgttctagatttttgagatgtatcagacactcttcctccattctctgttgccggcgcaactcacgcaagaggtcgattttctgtctggggaatctaccatcccgcataaatctctcaacgttatgtctggtcgcgaagaacgcaaggcggaagctggacttttgtcgacactatcgtcgtatcttctaagtccatacacaaccagcagcgacgtcttgactgtgcccaatgaggaagacatcgagaacactctttctgccattgattgcgtttcatcatgtaggctggacgagctttatgctcaagtccagtaagtttttaccacgacccaggcggcatgggtgagcgtgaagcgtgctaatctgagcacgtccaacagcgcactagaacttgatgcaacgttggccagccttcatgcgttacgggcgttggcagaagcgagatgcatgccgaaaaccaaggactatctcactgttaggaatggcaaggaagacctatcaggacgaccgctcacacctgcatacgatgaggctcagcagccatacgatccggccgcactgtttgacctcgagatcatggtcagcatagctgtgaagtcacctcaatatgcagccgagacttggtaaggcatcgcaattttttttttgcggcctctatgctgatgcagatgttcttgtgcaggcccatagtgttcgaatttatctcctctctactatcctccgcccaatcctatagcatcttgctcatcgagagagcagtcacggctctactgaaactttgcttgctgatttgtgacgaggtgagctcaggctagaaaatcatgtttgcccatcgcaactgacatcttgacgccctagcccaaattaagagaccagctctcccttgcactcgacgtattgcgcagtctgccctcttctgtcttaaatgctgtatcagaacagttgatgacggggatagcgcgcatgctcgagaaggacagcacgattgtcaagtaagtcggtcaaggactatcgacacgaatgaccctattggctgatctcgttcatcgtagatcgcagaccgaatggagtctggtgacagctcttttcagggctacagtagcgcatcctgaagcttcgaaggtcacgctggagctagtccaaaagatggcgacaggctccgtgggttcgggtccatcagctgacaactacccgggcatcgtcgccattctcgacgaattcgccacctccgccggtgcagctgccagtagattgcaagtctcgcgccgaggcacatcagccgcgcccgcggctacactgtacgtacttggctctcaggtcactgcatctttgacattgacaggtgtcctctaccgcgacgcagcgggcctaccgtcgaaagaggtctcgccgcactcgataccttgtacgagctcaggaaccgagtgccacaactggtcgagtcctctgctatactgcagggacaaggtaagcacggagagacgctgagggaatatatttgcatcgttgacgaatcgaccctttatgctgttccagcttgggtgacgttctggttgcctcttttgttgactatagcgaaacacagcgtcaacggtagtcgcgacattcgacagagagctataggctaccttcaacgggtgctgctcagctctcaggtactgccccgagatgatcaggatgctgctttggcagcggtcttctccagagttctgtttccagtggtcgacgagctgctcaagccgcaagtttacaaccaggacccgccgagcatggaggaaacgcggcttcgagcttcggctctgacctgtaaggcgttcttacagtatctgatcccactagcggagaggcccgatcaactactcgaggtctttctgaagattgttgacatcatggaaaggttcatgcgaaccggatccagacaacttgtaggtcaagggtccgttcatatccgttcgtccatacgagccaactgacactgagcaaaattcgcagtacgaggcagtgcccgagtcattgaagaacgtagttctggttatgcattccacaggaatgctggtgcccccggctgctcctgacgtcagaacggctacacagaagcaactttgggacaaagccaacgatcgggtgggcaaatttctggggccagactttatggccaatgtggtaccgcaagacaagattgttccgcctgagacagttgaggacgttgctatcccagctgagacgcacgtaccagtcaccgaggcagtagaattacaatgatgccgcgaatttgtgtcacaagctctccatgcagctatataatgatacctgatggctcgctgaagtttctgaataaggacttcctggtgcagtgatgacgaatgtcgatcttgcagtcgccgcttgattgcttagcttggcacagctgccgtgacctggttagacaattataagtccgtatttgctataggcacgcctgcgagggagtactttgcatagattgtagtgtcgtaccagcgtacacaattagagagctccgacacctcgggaaatacgtcaaactctgtagctattaaacgaccgcatccagtcttctcaagccattacgctcctctcgcaggtcctatcagaccgaggtcccggctggaacgacagggttctcccaatctgcgaagtctcatgaaagatggcgttaaactgggtacaactggtatctcacggcttgaacgatagtccggtcccgttgccaggtaagtcaaacagcggactatctgttgatcttctgcggtcgtgggtccgacatcatctttcacggacactgaattgcctcgtaataggcgagaactttctccatcgatctgatggtgtgtctttagcgctggtggtacctcacagcctggaaggaccgaaacgaacactcgatggctttgggagcctatggatatctgatcagagggtaagcggatcaacaacaagctccagcgcgatcgagtcagacccgctcaacatgaagccgggacatatcttctggcaggtgatcttcgctattgatagatcgcagcaggagggttctcgggcggaagatgccgttctcacaggaaatggtgagggcctgtgcaaatcatattgttttaacagtcatttgacaggcatgcactggtgtcggtatctctgacatcacagctgaatcgactgagcaaagtctttcggcaagagctctgcggacgctcggtgtgccttatgtaagatcagcatagcgcatcggcattcggccaagggatttcgggatctgacgcaaagcagcggtatgaaccgtaggctcaattgatcaagacgtcttttaaccagccgatgtttttcggtgcgaactcgatctcagcgcaattcctacctacatctgcaggtggtcttcctgccatcggtcgcgacacgtactttcacatgacgctcgaattcaccgaagggaaagttcatgacatttggagaacgatggagaaggccagacagaaagcggatacggccaaagccgactcggcttggaagagggatcagcttcgtgagggaccgtacgagcacgacatagatacgcagcatcaagctaacctatagatctcacagcgcgctacgaaccgccccaggcttgaactggcaggcgttatgtcacatccgcttgtcagtcatcgcacgcagttccccgtgaggatcgaccgtcccgataggatccatagtgccaatcacagcctggttctcggggttattcgtcattaggtttcttatggctagcagtgcatgttctcggatgacttcgttgagagaggattggatgagacgcggaaagctactacttggctcggaagactcacggggattatattcgtccaccacacacaatgacaaaataagatggataccggcggcttcccggatacgatcttgactggccttgtcgtgatatgctactagcccgagtagctgtacgacatcccgtttcaaagtcgcgaaagcttgtaggctattactgcttttcggctctgttgacggtctcaacggtttctgtcgtggtacagcagcctcgagcgatcccagaagctctgatacagtacgaatgttagccagtcttgcagtctatgtgaatagctacgtgacttgcctatgagatgctcgagtagattgcatccggctcgcctgagtgcgcccaatgctgggccttttggctcgttcaagcccgctagagcacgggctaacagttcgcgctcgtgatgagagggaatttctcgtagcgctgccgcgataaggcactggcaaaggagtatagagccttcaagcgttcttgggagaatcggatcttcatcggcagcgactccttgatccggttgagcttcaagtatctgcttaagctttgaggctgcgaacgtcgcagcggcgtccaggtggggtaccaagtacgatacatccggcattatgcgagtttcatatgcatcactgcttgatgctgtgtttgtctgcaaatatccgtcgagtaatttcaggaacatgagttgagaaggcgtgacaacctcttcatgactgacaagtagggaaatccgtttagctcgcgaccttcttactagcacaaacaagagagatttacgatcctagagcttcgaacaacgacgcttgcaccggatctggcaagacatatgcgacaacctggtaactagaatcctagggtcaggttggctgtttggtgcgggcggggatatctcaatcatacctgaggtcgaaacatttcccctccatcgtctcgcccgagagatctgaccattttcccatcttgtcgaggatcctggccagaatcttcgtaccttgagttttgtcgagcaacgtactaaaaggggtcgtcgcctcagttatcaagcgaataaatgtccataaatcgcacaaactcacgccaaagtggggtcatttctaaatgcattgctcatgagcatcaggacagataaattcacctgagtatcgtcagagtccagagagcgtctagacatacgcaatgcgtggacgtatgagctagatgctgctggcggtcgctgcaggaaggcacgacataagagagcttacaggataatctgattcctgcgctcatgctctcccacataagtatcaaagagactcctcgcaagaagccgctccgttgtatcttgatcgaccggcgcaaggagattggcaatagcttgaagtagagcacgctgtagtgggaagactacgatcacctccgtgccgagcatgagaagatggaccactacttgtaagatcccaggagtcttacaacgttcttctttgatcgcgccgaagctcgtgctcgcaaaaatggctcgtcgtaaatggggttcactctcgctgtagattgcgggaagaaataagcgtacgcacctggctgaaatgcagaccgacacaaacttacctaacgagctgtttagcgtgatgagaccccgccaaacaattccgggtcaagcgcgctaaagccaggcccgctgcgagatcttgttctgagatctcgaaaccttcgttctcgagatgtgctgcatatgccttccatgcatctgagaggctgctggtctcattagcctgtatgataaactcatgcctgaccggtgtagttcaagcacagttcagaaatgatggctgcaatggccgctgactttccactcgcctgcttgtggggtctcccccgatgagtttgtaaccgtcaattagcgtgtcgacccaagggcgggattgggacacggctcttaaagcggtgggcagttgccgtagggcatccaaggtggcatcgatggcttccataccccttgaattcgtgatggaccggtggagtttcgcgatcttacaggagtgggcagtttcacggctggacggctagctgctgccagtctagtcgtgacaactcatttcgtctgatgcgagatatgcgagttgcaagttgaatcatgcttgtagatgcatgcatgatgcatgaagctggaacgatcgactcttgattacgtcacgtgacccgggatcgagcgagagacattgcatgcatggcctacttggccctcgatgacgacggcccggtcatcgttgatcgagattcccattcgaaaaaggctgacgcctcgaagacactactctactactagctagtagctactacgctactactctaattcctgagagcaatcgggcaaggccttgacacctgcgtaccctcctaactgattccttttcgttccgaaaatatccagtagccaacaccagtggccatcttgctctttcgtacctacacaatcgattaagcacttctcggttatgggggtcagcttgaaacgacacctacctcaactccccgtccagctttgttatatcgggatctttagtccgatcggctaaatcgcccttgcagggccagcttattctctacaacatgccaaatctacagcggacccacaggcttaccgtgccttcttcagtctctagtaccatagctgctcaatcgcacaagcggctcgatggtcagcccatcgtgcgagataagccgaccaagatcgctctccaggaaatgccggtccaccacggatcgcgcttagaagcagacgaaccacttcaaatcgatgaagttgatagcatagtggcgattcttgccgtgagtgccacggtaactgcttcgcctatgcctgcgtgagacttctgaacgatcagaactttcccttgcgcgtatcatttcgatctacaggccgaattccccttattagacgaacctctcatcagggccatcgtctctgatcatactccggaacagctctattcgaagacggaagagattagggaagatctcgcgctgttgcaagctagcgtcgtcccagatcccgatgcatcgcggtacgaagctcgaatcgagccagaaatccgaccagaatccccactatcggcatcattggcggggaatctcaaccatgtggacagggagcaggagcttggaggtcacagcccctctgaggagctcatctcgaaacctccccaacctccagatactcagcatgttgatcgcgttgccctcgaagcaccagatcaagatatcgcaagcgcggtcgaagccggctccagctcctcaaagagtgatatcgactctgcctccgggtcagattcagaagtaatgtcaagggatatgacacaagaggaagccttcggtcccactgaattcttgtgcgaaatgtttgagcacctgtgagtacagtgcttgcgcaacgtatggtccaagccaatcgctcaacctggcctacgttatgtcaaaaagccctctggaagacgttcatgatgctctccggaatcaccgcattgatgcgggcggggacctatctttagccattgaagacttgttatcgctcgaggcgatcaagcagcttggacgcaggagctctcattcgacgctgaacaacaaactcccggatcggtcccctcctcgagaggaggagagcgattggcgcaacttcttcatcaagccggatcttgccgctgccgtcccgcctctggaggagatccaatctgatccactagccggcgacacgaccttctccgattctgggtcgatggaggggccacatcacgacattggacctcgtcccaacgatcgacctgttttgccgctaaacacgcagatgtattctaggattagccacccctcaggatccactcctgtagactcggacaacgaaagcttggaggatttacctggcacccccaaggtgcggagagtcaagccaatcaccagttcaggacgttatgcttctttagcatccgtgagccgcgaaggatataacagcttcagcagtggagatgagagtgccggttccgtcaagaagcgcacaaacaggtcatccagggccattcctctacgcgatttcgaacggcgtcttccggctgggggtatcattgctcctgctcgtgcgggcgaatggggaacgcttcagtcgctggcaacctatctggcagaattggttagcaaacaaacggccgactcgtcttactttttgacgtatttccactctcccgaatttccaaatgggtacgcagcagttagggaagctcttaccaaagcgagctctcccttggcaggtctgcgggcggagattgcaatggttcgagagatcagagcaggaatcgagcagagcgcgcaagcccggactcccatcgaagacatcacgctctgcgttggtgctgcaggcgatgtctcacgaagtctggatctgcttgctcttctggaagagatcaagacctggggaggggaaaaactagattctttagggtggacaccggcgagaaatgacggatcgggagtcgctaaatctcaatcattgagcagcaggggacagaaggatcccttggcgggcacacagggacgcggacaacgacctgtccagcctgagctgtcggtgcccaaacggaagaagaaggaagagcatcctcaaaactggcgtgttgtgcgaaaggagaaagccaaaaagcctcgatccacccatcgattggcagagttcatccccgggtatgcaaagagctcgtttggaccggatgctgtccttttcgatatggacgagtgtcgtcgtcgagctgtagaagagcgcgtcaagcgtgaagcggctgtcaggcaggccggcaggcatttccggagcggtgggatgggcggtagccgtgggaaacaagttgctgctttttacgccggagaagctcgacggtacgaagcagccgctcgatcgtgggaactgcgcgcagccgaagaactggtgaaaaaccaaaggtaggtggccgagcattgtgcttgattaaacaggtctcaaggcttatccttctaccaccgccccatagcaaatccgatgggactttctcgatcgacctccacggattaactctggatgaagcaaaatcggtggccctcgaccgtacacaagcttggcacgcgtctcaaaatttcggtatgcctcgtccgcgaaaactatcctttgtctcttgccttgttgcaactcgttaactttggtatgcttctcaatacacccctatagtccccgttccttcaaagccgttccaaatcattactggccaaggcaaacattctgtcaaccacgtgggaatcttagggcctggagtcgcgaacgaattggagcgggccggttggcatgttgaccgaggttacaatggtaggggttacattgttgtccgtggtgtcagaggatagctggcccaacttgcatgccgaacttatgcaattatacaattatacacttatacacttcactggagatgatcgctacctgattacttgccctgagacccagtcgtagcttatttccacctttccgacaccggacgtatggtcagctgccgacctcgactcgaggagtgataatgccatcacggcaaagatatggattcgaagagctccagtctgtttgtttcatgatattttcactcatttagcagcgtttactcgaattcgacacgaccgaggccaatatcgaccatctcttcaagcaatataacaatgtgggagctaccatctactcgcgaagatgcgtcctccatagtacgcgcaatttcaatcagtacctcgagatgtcttgttgtgcccgttgacagccgatatttcaatttaggcaggctggatgtccatcgcatgctgggtcatcgtgtattcgcctcaagtgagtacaagtccaggtaatcgatccatgaatccctcgctaaagaaacgtcccaaaacatagatcttagaggcaagtctcagtgattcatcgccattattggactaggtgttaacgggattctcaagcagaattatacgcggaagtctggagagggcctcagcgtcatgttcattgtgcttgtaagtggattcttataaaactgttgggtaggctacgctgatgttggcagtagtggctggcaggagacttggcaaacctcgctggtggcgcaatggcacggctgctaccgactatggtgagatcgggcactagtaatctgtgactccgagctctcaccttctgcgcgtcttctgcacgttcccgttccttgtatgcagatcattttggccgtatatgttggtcttttcttgggtttgaaaccgcacaaaatattgctgaaaccctccatctgtcagtattcagtatgcgatatcgttctgctctttcaggtctactattagtgagattcttgttcctgctagtggagcagaatggcgctcataactgcttctgtgcgcagccgggcgacgcaaagacgcgatgctacggcgatggaatctcaacctctgctctcggcagatgtggagcccgatcgcgcggttgtcaagacaaagatgtcgccatacgttgcataccccttgctcaccgtcgttattgccgctgtcggcatagcttcgtggtacattcagaggtcacttggccagggcgaacaaagagccggaggcccgatgcccaagcttgaatggaagtcgcaggttctgggttatgtctctgcggcgctttacttgggcagccgagttccgcagatcgcccacaattagtaagctgctgtcgactacgttcagaacgcgaagcccttcttactcgcttctgctccagccacactcgctgtgaagggctcagtctggccatgtttttcttttcgatctctggcagtgagtttacatccatgcatatcaacgattgaaaacactcaaagggaaaattggtatctccgcaagacttgacatacgtcgccagcatcttatgtaaaagtctcgataagacctacgtgcttgcaaacaccagctggctgatcggttagtgaaagggtttggcttccacggtggctgctgataagcttctccaatcagggtctggagggactgtactactcgactgtatcgtcctcggacaatttgtttacttcgctcgcaagcaggatgccgatgcgttaatggattgaaatcaatggcgtggttcggcaacaatcctataatatccgtagttgttcggcatcgttccatttctaaatcacatgatgatacaggattccttgccaaccgggcagagatcgccccagctggggatactctgttccatgcgagcggcaatcggaccggttcgtcgtcttaatccgagccgcatagtcttcgtcccagttgcaggtgcctcgtaataccatctcagatattgtccgtgaatttcgtatcgaccttcgttgaccttgacagtgatgtccagctcttgcccgtccaagctctgttgtgagaggccctgcttcgcatcgtgctgcaccttggcttgtacaggtccatcgcgaccgcgtgtaccggcggcgtcaacagacatgacatctgaatctcgagcgtaatgtacgaatgggacgtaaatctcggtgaaattcgtcccgcctgcggagcgtttcgagtcaacctcaatgactacctcgaaacggctggtccggatgtcaaaggtcatgctgcggggggtgccgatcatcgcaagagggtaaggcctgcaaaaggcaccgatcgcacgagcaccattcagcaagagctctgggggtatcctgctaccacttcgaatcgcctcgggagagacgcgatcgcgcaatcgatcgtagagggccaccaccgcaggtgaggataaagtcgatgggcgcgagcgctcagctacagcgttacctatcgactgttgactctgggtagcggtggccaggagagctgtcgaggatgcagcggatgtcacggcagaagtctccgccttctggtaatcggtggatatgtagcgatcgggcacgatatcgtccgcgctccatacggagaggtcttccatattcctgagcgtgggacatggcttcagcggagcatccctgctccggattgcgaagcaatgcttaccattgatccccatactcatgggtgttgtctggacaataagtccagagcgtccagttcagcatgttgccaccgtctgttgcggataatgacgcgtcgagggcccgctgctgattcgtataatccccttgtccaataccaccttcgcaatacccgtaggctttgcgatcatcctgttagagatctgatgagcaagacgtaattgctcacgcacatcaatcaagggctagtaccaaccagatcaaaaggtatgccaatttcgcctatcaagctgggcatctcattacccggtccgaagatcttgacatcgtctttgagaattttgagactgcaagccaagctgttcctgacacggccttccccgagactgagtgcctgggccagagttggatacttgccccgcaggagaccaacgggctctgcgttgaaccaccaccagtgccttgtgatcaatgtcagaccgtcgtagaaatgaggcgcataacacgcgcgatgccctagttgagaagaaggaatatgtggcggctcgtggaatactggtggctggatgaaagcgatggcttctggatgataacttcttacgcgttcaaggtatgcggtaaaatgagggagccaaaagtccgtttcgaagtccactttcctctgcttgctcgggttttgggagaaatagtccggctgccggatcgtttggcttttgaggtcccaaacaccgtgctgtgcccaaactgaccaaaaggtaggaaacgctcgatcaagctgggccaacgaacagggcaagtgaaccgagcttactgcagtgtcctgccgaccatgattcgccgcgcttgtatccccaatgctgttgccatttggtgtcttcaccactctccatccagaccttgacgccttgaggatcgagatcgactgtgccattttggctgggtccaagtgctccaacgatccaatattcggcatccgtgatgctcaaacccatgcccaatttgaactcttgcagcacagacgttgtcggtcctttgtgcatcttgccttgggaatgatcaacgctagaaagctccgaccggccgatcagaccctcagcaggttcattgatgctatcccatccgatgaccacccgttcgagtagatcgccgttgtccgctttcgctatcgctgcagccagagcaccgacagcaccgagataatgagagagcaaccaatcctggatgttcaccccatccaggttacatcgcggagcgtattcgcggccagcgaagaacagcgtccacatcgtaaggttggccagacgatcatagttggttgaccaaatcatagcggggaattttgtaggtgaaggtgcctcgttaccctccgtcctggggtctttgtagaaaggctgcagaagagcagagtaggtttgtggaaagttccgaggttgcaaattgcaagcatgaagagtccatattggggcaccagatcctccggaaaagcgtgaccactttcattgtaaggacgaggtcaaatgaccatcgtttcgtcggtttcacacaggcaaatcactcaccacatcctgatgcggatccatgaacacccgaaacccatagtctccgcaccgccggagcacattgaccacgtagtcgatgtactggtggtcatactgctttggaccggcgtgttcgatggattcccaggtaaatacgaagcgcaatgcgttccagccccaagctcgcaatcggcccaaatggatctgtgtcggtcgatcgaaaaaatagtcaatgtcgatatttattcctagcatagacgtatgtgtaaggatttctcacgtcggcactgccatcttccagattcagcggcatgccaacccagctaagcccagctccagcctccgcggattcccataaatcgtctccaagctgctgtggatgccccttaggacactttgttgaaccgctcaagttgacccctcgtagaatgagggtacgtccggcgttatcctgaaagtgtaaggtggaggcatgaataaagtcggccgatacgggcttcccggtcaaaggtgacgtcgacggcggcaaatccaacatgtcgctttttgcggagaaggctgaagtaatcgaacaggatgaggcagtatggcaatgcctgcgcaaggtctgactgaggtgacccttatctgtttaaagtatctggttgactcgatcgatcgatcgcccttctccataacagtacagctgagctactctaccactgctgaccagtacttgagctaccaggtggcggctgagtggtcgattattgcacaggatcccctaaagacgacgtaagggggattcctgctccgtcgtcgtaggtcgttccccgtgcgcagtggtgcggcgctcccgaacggtacccatcgcgcgacgtcatcgaatgaggggaagtcatagccgaggctgatcacgtgattatcgcggtgcgatggcactcgggcatgatcaccgactcatcatcgagatcttccaggtgtcatctgcaggtcacaaatcgactagcttgacaagcgaaaccatagctcgaaaggggcaaatagatatacacctttacagcgctctgctgggttgcaatacgatggcgtgaggcatggctacgcctgaaacccaagcaagaccgcctcctcgcaaggcgttgtacgggctgctaggctcaagctttgcttttctggcgtggattatctatgggatatgggcctttggggcagagttgctgttgtcaaagatcggattggcatggcttccggatcggtaagcaattcgcatggccggtagtggccgtgagctaaaggttgagacgttttcagttactggactttgctggtcccggcgtatctgataatattcatcaccttggcctatgtcgtctacttgtcaatgatgctcatacacatcccatcaataagctcccttgactgtatatatggtaaggatatcggctggtggttttatggttgaagctcacggcgggcgctttgaaatcacttgaccagacgccaggggtcaacatggacacgctaccctacaggccgagactcgtaacgatcgctcagtccctcataaagtagggccacgagcgtctcaagttacaatgccgaccggggacttggcaatcggagtagtaaaccgtagactataccctgctcgccttcagccagatgccgcctagcaacataccgcgtttcatttatggcaacgcaggaccgtttcgacgtctggtgcaccgtaagagcttgcacgatgacatgaaagcaaatcgcgcagtctgcgggggactcgaagttcccatgacaaatccacattccaatgatcattcagtgaggcgttccacatcaggttgccaccgagcgatgccgggcgttacacactactagtaacggcaccggatccagacagcgagtgccagacagattgcaggccgggcacgggatgttgtggtatagaggcacatattgcagaatgtatatggaggtgcatgaattagctagagtacagaacaacttgtatctctagatgcctcaggtgcagttatcacgttgaacatacatcctactttgttacttagcaagagacatatcgaaagagattacaaacaatcccaaatacaacagcaagcaagcatacagtgatgcacaccatgaggacacttggagcattgtgtgctctatcaagcgtatcttacctttgtttccttgtgcacctgcatcactactcctctacccctccatgtcattggtgttgcctgttaggattagtccttagctatctccttgctactccatgcgggactgcaccctaggtctcttacctaggtaacggatgcagcactagttctactacagtggtctacactatgggatatgcctctctagtgttctatgtgattggtacagggacctctccaagggatcgcccttggagtctatcacatgacccaaccggggttccaccctaacaggtactccaaagtgatgtccaccgtggtattgtggtaggtatccgcggatacgatatattgacctggacggcaacaccttccaccctaacaattggcaacctgtgcatcagacttagcgtattacttaccataccagggacccgcttgcaaatgatctgtgacatcttggtaactcatctagcatactatttcgcatttggagacgcttgcgaaggtccaggatccatggatcttgatcagtgtttgcttgttgataatgctgcaattgaaggttttccagcagaagcaatatcctgtgcttgtgtatctgttatagaagtgtctgatggcaattgtatctgtagtcattggggaccaggagtcagtagtgtaaaagcagaataaagtcagtaataggactcgattgactaattgtatatgtctaaccatgacaaggatacagtggctgagtgttgcatgatgatgctgctcaattgtgattgtgtaaaatgtaagattgtaacatatgatacttcttcttgggtggtaagaagaaaggaacatataagggaaacataccatgactgagaaaatgtcagctatataaagtaattccagcatgttcctagagtcggtcccaattccaatcctgatgatgatgatgatgacaatgctaatcctgatatcaatcccaactctctgtgtcagctgactgggttagtctgtaacgctatcaggctagaggtctggagtcattgccctaccatcttgatggctgacctctctctcattgctcatgtctgggattggggtcatgagtaataaggaatgcagaattcaggcttcagtcttgtcgatgatagctaagacaaattgacagaagtcggttgattcatgtgatcaaaggacacgaagcatacagatattcttcagaacaagagcaggtcttggtgctggtgagcaagagtgttatcggtttgtctgaccgtgcaatccatgaattgtaactcaggccacactggaccgcctcatagaatatcataaagatggactccatgagagagagagagagttcttagagggattcttggaccagtccaacagatgctaaaggttactccatatatgcagatcaattagcagtttagtactgttgcaaataggcatgtcatgattggctcatgggtgcaggaagcaatctcaaccacaaagcctcattttgtagaatgtacattgtacattttacgttgtacaatctacaggattcactgtaaaatgtacaggtttcatggggttgtggagccatgaaggctacatcagaatagtatatataggaggccaatttggcctcattcctttttccctctcatgtactacttcacttttatgcaagcaacattgatcatcctttcacaacaaggcatcatcagcaccaaccatagtgcctagacccagcaagtaaccaatctttgtggatctagttgttacttcacaacaagtactgcaactgattcataatgcaaggcagaattctgcggagaaattctgcatagagtgagatgcaatggagttagcaaaggattaaacatccctaatgaagaggattcgttcgctggacgtaaatttgctttgtactgttgcatctccttcggtcccttatatttggctacatgatccaaatccggctcaaagtaaccaaagtctcttcagagtctttttgccaggtgtttgtcgtctgtccatagcgaagccagtggatgttcctctcttctggttcatttgttcccttgctttcttgttttggttgactcggcctgtgatgctagctgtggtccgtgtctggcctgtgctctgtctggcgctccctgccttcacttaatcccgttactgtgccgttacatgtacccttgacgtcgatgtccaatctcgccctgtgacttgctccataaataccgcatcctgaaaatctggactttttttgtatttctgttcagtctcagctgcctcatctgcaattcatgcaatacttgctcgctgggactgttaatcagagatttatgatcattggtctatgtgtagtatttttctctgtagtgtactcagtgtctagtccaaggggcttacctcagaaaatttctgctggtacctgtcctatagtattacatgttagggtactacatccggcgcgtcacgtgacgcctcccagggggtgacccgtctcctgcgacctgagcggtaacattacaccctagtggtctcgccaggtagtccctctcatcatctcctgatgacgtgtagtggaactgatacacgcaacatggcacgttatgccttggccttttgtttgtgccggtgatttttttgttacaaaataaccagtagatttacccagtctcactacttgctgtcccaaggccttactacaaacctactcagtgctggtcctgccttcttcttgtccctattagactgtaagatcacatcaaaaggtctttctacagatccaagcaatacatgaatccaggcattcatctgtataatgtagttcgatggagagtcaactaacgatcttttgtccagactactctttggtgacttgcagtaaagcacgatacaccacacttcagaatggttcctgccgcatgcaatctagccaaccactgtccttacatctcgtagtaagctgcatgtcagcaaggcgtagtcagctgtaagtcagaaaggaaggcgtgaaatatgagcattctcagttgttttgccttatagttctttctgaggatggccttgtcctccccggttgatatgccattcactgatccagcttgttcatactatcattctcgtggatgaacctgaaccggccgtagtaatataaacattgcctacctttcctctgatttggtaatactccatctcagtgctttttgaattggtgatgttcctgtttaattccttgcaatgaggatttctttcttggatgcgtagaccggccagtgcctcctctcttattatcacactatacagtgctaagtagtattgatgtacgttgacacgactcttttggtgactaattggaagcggccaagcagatgaatctgtaaagatgcgactgtgatcactcatttgcgaccacaatcacatcttgcaactcctgtcacactattgcaactcctgttacactactgcaactcagccacagaactgcgactgtggacactcatttcctcctgtgtttccctcactttccccctttgtcatcccaaatcccaatcatcatcaattcatccatcatccacgtcaaagtcacatctccatcacctctttatcgtctctcatctcgctcagtctcgtcgtagtcccatcctctcgtctcgatctctccggtcctctctctctttcttcgtgccggctcgtcatctcgtctcgcttttcaaccggtccgcccacgtcgtcgacgcgcaccacaatcacaattcttctctggacttcgcgaacaaatcgcacccgaaccccagtcgacacgcaacttgctcgacttacaacgtcaaagcccctcggtcttcgacgagaacagactaggaaagaaatccagtagaacatatagataggacttggtgcccgtcgtaatcaacggtgagtggacgattgtcgatctctgatgacggagagacgaagacgaatggaggctgtgaggtggaacgagcggacacgcgcgtaggctgggcgtgggcgtgggttgtccacgttcgataattcccgaccgacgaccgaattgcccagagagagtcgcttcgacctcgaatgccatctcaagacaccgggcgagcgtcgtcgaggaggatgaccatgatggatccgtctcgttgaaatcgggagagcgccaagtcgaaaggaaccgagaggacgtcgcgtcgtcatcctctgcgaatccgcctacatcgccatccgatacatcgttatcagcatacgcccaaagaggtggtcgaggtgatacgaggtcggatgagcggggatgttaagcgtcccgatggacggctgtcggtcggatcgagctggtggaccgaggatgacgtggtgtctagccaactcgtgaacatacccagctgacatcaccatcaacgaaaacttcgctcctacctgtttgtccctgtagaatcgccctctagtccccctattcaacccgaactcaacgagcgaactcttcattcatcatggccatggatctccgcgtcggcaccaaataccggatcggtaaaaagatcggatccggttcctttggtgacatctacctcggcgtcaacatcgtctctggtgaggaagtcgccatcaagctcgaatccgtcaaggcgaaacacccccagttggaatacgagagcaaggtgtacaagtcgttggccggtggtgtcggagttccgttcgtcaggtggtacgggaccgagtgtgattacaacgccatggtcctcgatctcttgtgagtggcgtcgacatgctgggtcgcgggtatcgtcgtcgggctgacccctcgatcgtgctctttcacaggggcccgtcgttggaagacttgttcaacttttgcaaccgcaaattcagcttgaagacggtcctcctcctcgccgaccagctcgtgagtcacagcgtctccctcttgttcctccgcgtctccaagaatcgtaccgccgagctcacccggttctacgcggaccaccctctcttccgcacgtacagatctcccgcgtagagtacattcactcgcgcaactttatccacagggatatcaagcccgacaactttttgatgggcatcggcaagcgtgggaaccaggtcaacgtcatcgatttcggattggcgaaaaagtacagggatcccaagacccacttgcacattccttatagggagaacaagagtgagtgtggcaatgcggttggacgtgaaagattcagagggagggtttgctgacgccccgcgcccgccccgcttgtagacttgacgggtaccgctcgttacacctcgatcaacactcatttgggtgtcgagcagtccaggcgtgacgatctcgagtcgctcggatacgtcctcatggtaagtcccgcttcatgatggaattgcccggcaccaaacgggatactaaccagggctctggtcaccggcgcagtactttttgaggggagctttgccttggcaaggattgaaggctgctaccaagaagcagaagtacgatcgtatcatggaaaagagtcagtagcccgcctccgtcgatccggtcttcccatgcgagtcgacactaacgacggctgctacgacgatacagagatgaccacggcgaccgagatcctctgccgaggtttccccaacgagttccccatctacctcaactactgccgttcgcttcgattcgacgacaagcccgactactcgtacctccgaaaactcttcagggacctgtttgtccgcgaagggttccagtacgactatgtctttgactggtccgtccagggaaagcccaccatgatggacgagcagaggcgtagggccgaggcccaggagacgtcgaccgctcagcaacagcaagggaccgagaaccagaggcagttgaggtcatccaccaggatggccggtgccggtgcgggaggcaccgggagggaagcgcccgctggcaactggtagtcgcacaatcaagacgaggctcgctcaatatcgcagaggtgagtcaccaagtgtggggaaacggtcagagccgaggacactgtgctgatacaaacagccctcgcagtcatcgtatacatcgactatcgcctgggtaaagggctgggacgggcacgagattcgactgggaagacgcgaacgaagggattgtctatacggaacggaggcggaatggaggacggaaacgcacgacgggacggctacgcgggttggaaatcgtactataataacaaactcgagaaggacggatacgggatcactctcgttatcttaccctacgaatctcgacccgcacctgctcgctccttctggctccttctggctccttctggtctcgaccgcttctgcaccgacatgttaccaatcgacattccctctcatcatgtcgacacggtcactcggattcatctctcttcttctcaacttggacgactgctctttcaacctttttcactcgactttttttacactttccggatcgacttggggttttttcttcttctcttctttatcggccctcgcgctccatgggactcggcagcgggacctccgcggacaatcgcaacccggaccattggacatctcgatcaatgctctaggcgcgctactgccagggtctctgttgacgacatcatattggacgcacggggatgcgtcgattttcatacgtgtacgcctttcccctaccttttcaacacttttccatcgttccttgcctcgagggtctcgcccacgccaataaatatcaatcaacggacactctcggttagaacaccgcagggaccgtctgcctggctgtggtccgagatcattcgcgtgcaagggacgcgctcggctatccaattcttcctcgcctttatcccttctcgagatcatccgtccgattcaacgaccggccgccaaaccaccccctttttttctctcatccgatctatggcggtcgggacattacctggcatatttgcacaccagggtcgaacggatatcgggagcggctcaagggcgagagagcgccgcggagagtgagcgacgagcagggggaggtacgcgacgtatgaaggagagaggggatcaagccggaggggaaaacgaggatgattccgccactcgagtactgcctcatgacgactgactgccgttccaaaggaccaccggctacagtctcggggatcacatcatcatctcgtcgaacccgatcggtcctctgcttcttatctctttcatccgggtttacccactagctcccaatcctctatagtactgcgtgtgattgtcagactcttaaatcgtatttgtatcatgtctcgtcgtttatctacgtatgtctttggtacagcggtcattacgaccagattcggtcatttcagtcaggtacagaaatcgcaatcagagtgtgcagtcaaacgctctcccggatcaacatggcgtctttgcgcttcgtcgaggtctgcccaacacaaggtctattcggaaaagtacacggatcacggtctgaaatggaatcaaatgctgtcccgaatttccaaggcgtctttgcgcttcttcacgctctgccagatagcgaaattgaggtcttcgtcgatactgagctcgagcctgaacgcttccttctcgagccgagacgcctcctctgcgagcctggagctctcggtccgcatatcgtacgctcgatgtctcatctcgagaagctcgacttgcgctgcatgcgcggtggcaatcgctgcctcgttcatacgcctcgcttcgtcctccatggcgagggccttgtcggcattggagactggggtggaggaagaggtggtagccgaggtggtggcgacgaccggaatgacatcgacggccggggtgatctcgacgacaggggtggtgacaacggccggggtatcttcgacgacggaggtgctggccagggaggtctcggcgactggaatggtggcaacgacagaggtattctcgattaccgaggtgctggtctcggggaccgggatggtgccaacagccgaagtggtatcgacaatcggggcagccccgctggtcatctttttcgccggggtaggcctgacgttgttcatgaccgtctctttcgagagctcacgcttacgttcggtactcctggacgtgatccaatcgctgactgcaatctgacggagactttgtcgaagatccgccgtggtcgaggagtcgagaccgagtcccgcgaagttgacattagcggggaacgttggtatgccctctggaaatgccttgatctgtagcagtagtgcaatcagtctcgtgttggaagtcaagacgctggacgaaagggggcacttaccttgctggaatcgttgaggaaggacatatcgaccacgggatactgtggctccaagctctcccgcaagccagccttgaagagctccagtgagtcagagatgtcgtcaaggtagtacctgacgccaaagtagcacattcccttgtgtgggccgtccgctttgggttcttcgttccggagcttgatgctcatcggccgagtccgcgatatacgattgaagagtgtcttgatatcgtcgtggctgacgattatgacatacaggattcggccaggggaagccacgtccggtaggactgaaacacccaagattgcacgcaacgcacacagcctttctcttgccaacagaggcccctcaatgaccagatttagctgctgggacttgatccagcaaagcttatcgcaagtcagtccgcgtatgccgaagacccggaacgatgtaaagatctctcgaatagctttgacgcactcgacagtgttgggctttgcgcctgtcaaagtagctgaagtgaggtaaagaaccttgtctcctgcgaacgtggcgatggatgaagctgacattgtaggcgagagaggacagcgaatgcaaggtggagttgtagggaatggagtgcgtagagtgtgcatatacacgtcggttctcgagtaagaagatgatgatatgataatgatgatgatggcgattgttgacagagtagtgtatccagacccccgcacaccctactcgctctctctctctctctctctctctctctctctctctctctctctctcgtctcgtgccccgtctcgtcgtcgaccgcgtgagaaagcgttttgtagcgtcacgtcacgtcacgtcacgtcggattcgccaccaaaggtctccctgtcctgccagcgtgatcaagatcacatcaatcttcatttccacatcaaaccactcactcacctttgctcgaaaccgacagctccatcaccaaaggcttcgccatcaacacgccatccatgaagatcaacaagtgcccgctggtggtaaaatcgggaccgaccgagtcctcagatccagtgggcatccagaccgagatggcatgaccaggatgcgaaacccgattactgtgtgcttgggttttgcatcctggtcatgcgggatggtagagggccatcttagtcttcctcgcgatagattcggaggaggcgagtctttaccagtagcaggcccgagctgcgagtccccggtcgttgcgatagtatcgcgattccgccacgccatcgttttttgggggggctcgtatgctgcgggctataacacaggccgccgtgttcggtgaccgatttgttgagagtgcggggcatggacgaggaaggataacgcctcgagtccattgaacgagtgacacctcctcgcagctcccgtaacggacatcggaacgacttcaggaaatggaagaggcgaaacatggccggtagctctgtccgctcgaatgcttctaagtctagttccttctttgcctcactgtctcaccgaccgatatgctgatcctctatcctcactgtggtccgacatgatccgacttgtgatttcgcatttcgagagaagaggaacctgatcgatacgtctccagacctcgctgatcgtcgctcttcgctccacagcttgtcgtgacgagacccggagcgagtcataagtgtctgtccgcccaggcctcatagtgtaagtccagcctcgtcttcagcccattctcccggctaccaatgtccgctgaggtcctgccgttgtgaccttgtcccgcctcatccgtagtgccttcatcgtcctgttcgaggtcatcatcgccgcaaggctggccataagcccgaagatccgtgcgcctacacgaatatcatggtacgtccagagtgaggaaaagaagaggtttgacaagatcttggtcttagttgagcttctgcgttctgcattcggtcttcctttcgtatagccgccttcacgcaacacgccgagcgtcttctcgtgctgtttcaccaccaccgcgtaggaccgtaccgagcggagaagttccataacagtgagtccccagcggtcttgcggatcttcataatggcttccggagctgatcatcgtttcgcctccgcctgttcaccatgcgtttcgatagcctctaccactgcgccatcacctagtctcgccgacgaggatggccaagtgaatatcattggaaagaattcggtaagtcgaagacccatcgcaacgctgacgaatgccgtcgttgttgactccaagatctccgtgtgtttggaccagatctttcgaccttggcatcacatcgccagtcgaatccatttatgggcccgggagggataggggaggcttcgtcaaaggtatcccgggctcctttccctttgttgtattgcgatccgcaaagacttgcacacacgttataatgtcctatgccctgaatatcgtattgtacccgtctctttgatgatggcactcgtgactggcaaggcaactgtccttttcccgtcgtccagccgaggtgaggcctcgttcattcgttcacggctatgttctaaaagatgatcgtccagcgcatgatccattgggagaagccttgactggagacggacgtgctgactgacaagcacctcgaggtaaaatagtcgatttttgagacgatgattcagcccgcctttattccatcttcattcagcgccaccgcgacgatgccttgttgatttcgaacgccggaagagtcatggtcgctgatctagaccgtacgggtggtttcattagcggtcgaagcattgctgagatcatcctaacccgcttctttcttgcctgggttgaagaaacatggcgtcttctttcgaacgatgagggattttttcaagccttcaacgatctggctgattgtacgttgtgtcggtctcgatttcgcatgtgaacatccattaaatgaacataggctcaagtacgaatcgatatgggtgattcaaggtaatgtatggacgtttgagccgatgcgtctctcaggattccctcgcttctactcgtcatcctcttgccgtttagggtgggtgacccaggttcagctcgaacggcgggttcagtgctgctgcagccaatcatacgcttttcgccacggccccgcggcaaacgtttgaggccgtgagaggtgaatcatcgatgctcgggcgatttgtttcggaaaaccccgcgaggtccaagacctgtatgtctcgtttcggaacgacccacaaagtaggatcgaacgagacgaatcgtggaaagataggcatggcatgacttcaacctagtgcagtgatgcggttgaacacagccatcccatcgcgacgacgtccacttgggtgtgggtgggactgatcagcggcctctacctctaagatctacggtatccctcagatccgatagaatctgataatatgataacgaggtaaatcaaagcaactcggggatgtgctcttgatatcgcagagaataagataattagtaaaacgactaccgaaacaatccaaaaaatgaacctttccaaatgacgtgtgttgaacccaagtccgccgtatgttcacctcgactacaaggcagaaagccaccataaggtacatctgatcgcctttgcgtagcagcagggtgcccaaactgtgccctgacgacaatcaaagctagacaatgtgcatgatttagctccctttcgttcacgagacctcccatcaccatggattagatcgaacttcgcgtcacgtgaaacttggagcgcccacgctgccggcatggcacaccacatctcgctgcattctgacgcactgacgctcatagcggtcattgccgttcttcttcagcttcttcatttacatcgatccgaggcactctgctcaagctgctcatcggtgttttgccgttcaggtattgcaacttctgcaagagaatggcggaccaaacaatcctcgcttctccgttcttccgacacgaagttatcgacaaggtcatcgcccagacgccctcgaccgaccgaaagaccacgctcgccctgctcgcaagcaaggtccgtctatgcgaagacgatcttaccgccgcccgaacggacaaatcggctagcatcgaagcgctcttacaatttcgagtggcatacgctaagggtctcatggaggatgtacagatcggcaaggccgaagccgaagcgctcaaattgctggaattgagcaaaaatatcgagaggcagaacggagagaccgagtaccctagtcggaccattcagaaggcgcgagatactcagatctacgccctggatctgctcagagagattgacgagtcgcttggaaagcagggtcgcgttaagaggtggaccgagcagaaggcaaagttgcttgagcggacaacattgcaagcgtcttagagcttgaagagtaccgctcaagctacctgtcacacacaactcgagatgatgggcaccatccagtctctggagatgtttcccgccatagacctggagctgtcgatcttgattcgattagcggggaggtgacaaactttgccaaaacaggcgtacacgtcacatcaactgcggcactctgcaaccgtctcattcgaaccatcgaatcactccacatgtatgcggccttccagcgacgtgcacctcaccgccgcgcctccacctcctttaagagtcatggccaattcggaagcggacgtcctagacttcgcccagtcgaatcgcacgaacgacgggccaagttcacacgttcagctgtttgtgtcaagaatatctccgtctttggtctagactcgatgtcgcaggagaacagagtttcggtttcggtctagctcaatacggagaatgagtctgggtgcaattctgtcgatgcagactgttcgagatccaaccaagcttcttcaacagacggaggtcctcctatctagaatcacgccaattgctctcaatcgaatggctctgacatgttgacgacaagcccacgacagatcgattgtatgctactgcgttattacattgtcgtatgacacacaaacgatgatttaaggcacctaagcatctagaagaaaatgtccctactatatatcattatggtagacgctgtcaccaggctcagtagatcaaacccaaggccaagacggccatcgagatcataccggtcaaggtcgtaggggaaacgccgctggcggctccattcgttgcgttgttctggatggcggtgctggcggtagcggtctgcgtattggatcgagtcgcactggcgcccgacctggaagcggccgaggtcgaagaggtggcggtgccgctcgaagcagcagaggagcttgaagcggaactcgaggcagcgctcgatgaagcggccgaactggcaccactggattgagaagctgcaccttgggactgcatgggctcgtacgtggtgagcgctccaggcgacgctgtttggacgacgccggtgggtccgacgatgggcgagtcgttgtcctcggcgttgacgtattcccacaggtctggcaaggcggggaaaggaaaagtcgatgtcagtttcggcatgatatttgagcgaagagctcgagtttgggtcaaactcactgttggcgtcggcaatgttactgacggtccagttgttctggatcataacggggtagatggcgaaaaagacgtcgagatcggccttgctggcttcgtctgatgatgcgaaaggatcaagcacgtcagaacagtctcacgctaaagctaatccggtctaacgcaatctgcagctggaaactcacgtctgggtgaaggcaaggacgaagcaaggacgctgtcagcgacgcgaaacgaatacgagcagaacgaccatcgtcagactcactgcaatccgatgtaacccttcttggcggggtcagtcaaccaaccggtcatggtgctaatgaccgattgacgggtgttttggccgggcgcagtgtccgagatggaccaatcggcactatcccttccgatctgccaggggaccgtcttgaggccaaagacttgctgggcaatcatcctgactcggttgtcagtgtcaccaaagggaggcctccagtaagcgggcactcggccgtcgttcaggtcggcgatgatctgagaggtccatccgagctcggcgacgacctgctcgttggtgagcgtggtcatgtactacaggattgcgagtgatgcaagtcagcgtccaccacacaagatccgtgtgcaaggtgttccttgtccgggactcaccgggtgcgaccatgtgtgcgaggcaatatgaccaccatccttgactgccctctggaaggtagcggtgttgtaataaatgttaccgccgatcactgcgaggcgagcgggcgtcgacgtggtcagcctgaatttcccatcgaacacggttgtcgaaaggtaacgcgcgacgtactaaagtgcgtcgcgctgatgttgttcttctcgatgtaatcgtacaactcgggactgaacggtgtaggaccgtcgtcgaagttgagctgccagcgtgcacaccgtgatcagttgattgatcatggtcggccaaggtatcgtaaactcgggcccgatctacttactccgaccacaccggtaggtgcatcgacgagatcctctggcgatacgcattcgtaagtgaacgaacacacctcagggtcggtccccttgagaccgttggcgtaggtagggtacccgttgttaggttgggtagggccaaacttggggaaatcaggcgaggcagtgacggctgcaagtcggtcgagccatgccttagggatacccgaggtgggaggggtaacaccgggagcagggaaggaggcttgccattctgctcacacggcgagtttgtatcagttatcgaccgcccttgactctagagtggatcgatcgtggacccagctcggacgtaccaggcgtcccagcgttggcaggtgctcgcctgaacaactttgccgtctcgctatcagcgtcttggtaccacctctttcccaacccgccttgggtgtatgacacgtgatcgtgatccgcgtggtcggcgtgagcgtgcggtgccgcgagggtcgatccgattagggcgagggccgagaagataagggtgggaggggtcaacatggtcgtttggagtacgggaggtcttcaagaacgtctagtgatgtggtaggtagtagtaggtcgttcgtaagataggtccaggtatcgctgtgtactctaataactctgtagaggtcccaagattcggttccggattgattcgttgatggaatagaaggttttttttcgaatgagaaaggtggatcggatcagctctacatcatcgaggtcgtgccctgtctctgatcaggcctcagttatataagctgagacttacctgttggtctgttgtactctgttgtatttcgccgagagaatacgattatcaaaagagatgtagcgtgtgtttggtgacgagaaaagagcgtatagagggctgtgtatcgcctgtgtagaagttgtagagtagctaggggtagctggtagcaatatgatttgggctgtgcggttcgccctggcagatgtgtgagagtggtcgagcgaaggaattacgaggcaagaagggttaggttgaagacaaggctatgctgatatgctgtatcgtagattctgagctcagagagtgcggccgagcctgtctttcgcctggtcgcctggtcattgttttgagagcagcggtagtttacaaaaacaaagtgttcccggtgttgatggatcccacccatgtcacactagcaaactagtcgggctgtgtcggcgctaaagttgaacagggccagcgcaagaagcagaggacgggcaaaccagcggtaccgagagcgccaccgaagcggaacgaatagaagctggcgaggggaggagggaagccgattatcaggaactcgcggcgttacacccgcccacacgacaacgacgacaaccgatcacaacagacttcgatccacccagtacacctgcaaagggtggtgacgttgaccccgagtgtgccgcgtgctccttcttggcatgtgctaccgaccggtgaaattatgccaagacttgctatgtcctcgaccgatgcgatgtttcaccgatccgacgtccgtagcaggtggacggactgcgagtttcaagagcgtgctggtggtcaaaaaatcctggcatggcggcgcattgtagacctctactcgtattagtcggtatggagccaagatgccagaggagccgtactctcatcggaaagacctggcgtcatgcgacacgtgcgacgatctgaatcggtcacgatattaccagtaagctgaagtcgatccaggaagccagaagaatgatcaagctcaatacaccaacttacagtgttgttgcaagaagcaagacttgatcttgccgacttttgagtcagtctcgtcaacgaagccaggccaagcgatgaacgatcgagactatgatcgatgcgtctgcgatgagacaacagaagatctcgttcgagccgaagctttggccgggaacacgatccaacccgcagagacatcaggcgaccgtatcaatagcaagtcttcatcatgattcgacgtctcatggattgtcacagcgtcatcactgggacggttctgccaagtcgggagcatatcatcgggcctgctgcccctgttgagaaactttctcttgggctcgagcaggaagctggccaagccggaatgagcacggcgcagcagaacgccgtagaaaacaccctaatgtgcttagccctcgccgccggaacacgtcaatccgactcttccgtgtcaggaggaccgtatagttgatggattctctttcccggagtgtgcaagtacaaaagggccacaaggatatgctacgctaatacagccgatccgctacagtcggctccctattaacgtagattgtagtcttgaccacttccgaactgtgttgctttctgcgaagtaatcgttatcaatattaccatcccatatcgatctttgtttgcgggcccgagacttgcctcggccgtagccattctccttacagtgcgggcttttccgcatcgagctcgctggccaaaaatggcgtagtttcctcgtccgaaaggagagaacttgcgggtgggtggtagatgaggtatattggggccgacagtccacatgtggccagcagaccattaacgattacgttgtacaatagatagccgtacgcttttgcgactttggcactgacaaatcctccaccaaggaatatccagatgaacaattgcccgatgtcaagattggcgggaaatagcatgatcggggcatgaacagcgtctaaccactgaaaccatgttggtggtgtccactttgagattgctggaaggatctggacgaagcagagcaccgaccatatggcgaacaacagaaacggcgacagactgactaaaggtctgtaacgcatggcgtagcgtttggtggaagttcttgcttaatgtgtcaggagacgccccacgtcaaagccgaggtaagagggaggggccatcaagttgtccagcatggatcctcgctagcatgagaagcggagagctgtagaagaaccttgacaatcgagaccacttccacgctggaattgcccgagtggagcgaggaacgtgcgccggggcacgggaccatgacgcgtgtcaacaccgatcgccgagctagcttcgtcttcgacatggagacaccgcacttcaactcgctacttcctctcgttgatcttcaataccgcggggtgtttcacaatgacctcgatcgttgcacgttcaagcattatctacacggccatatacgaacatggaatgcgagcccgggcgtcgaacttccacattccagactttcttcaatatatctgaacaggcgagctttcaaagtcattgcggcgagaacggcacgcgatgacaagtatgggaaagacatgaatatactgtgatcgggtcagcgggcccttcccatcaagtccagtcacttccgcaccaaggacaatctgtcaaggctgtgagagtcacttggcctagatcatttgccgcttcgttggccgcttctgatcttggagcgagcacttgtttgcggcaagtgtaacacgatcgcactgctccgtccgtgataacccgtcttgtcaaatcgcatcgctctgaggtgggcgaaataaatagaacaaatcaattagtgccgtctctttcacatttcaatcgaaacaactcacgccaaatatgccacgtatcgcagcgcaattcacccccggaccctgacgcatcgtcccctcggtgttcagtcaagctttccaggcagatagggcagtcaacgagtccctctataatcgtttctgatgattgatcccctgatggtgggatcatggctgccagccttgcaatttggtcgtcgaggccgcgcgataccggtaccgattccaaccagtttcgaagaaaagtggcattcgttttgacgagatccggagaacgatccagcgaatcggcgaaaaagtcgagcatttcccttttaaccgaaatcgtgcgtcgagcaatagtattgctagcttgaactacgtctctccggaatgcctgaggcgccaggtaaggagacataccataaaacaagcgattagcggaggcgccttggatgatattcgcgacttgtacatattacttaccgattgccatagctgtttgactgtccgaaactgctcccttctcgcaataggagattccaatagctcgtatcgcagtgcttttcgcagatctacgtttggtgtttgttctacgggatctttgatcattggcatgtcttcatttgtcgcatcatccacttcaattgatgcctcgctcttgtaccaacgaggaagatacgtttgcatctgtgaggcgggttgtgcttctccgaaatcctctatgcatgagttttcagctctatgggttactaaagcgctgaatctgacagacctacctccgctgccgttgtcatccgccagtccttcgccaagtgttttgaccagatctataactgccacccaatgtttgatggacccgtcccggatgagagtcaggtcgttgagtgctacgggtctacatgagcagcgaatcccgatcagtactctgagcgatacttatcagtgagatcgtgtcgtcagcactcactcgaagattatgcccagcagcgtgccgctcgtatcggcacctacaatccgcagcgtcatgttctcggaaaattgctcggtaaaacgaagctctcctccctgtttctccctttgcgactccacgatctgtttgtccaattcttgaatgctatcaaggatagcttttgacgaggcgatcgaggcgttccgatcgatgctcggatcgcttgtcagattacgaatgatgtgtacttctcccgaccataaggtaatcaaagcggcgtcgttattgagcgccccaatgcctatacgagagagttgagtttccagcgtggatatctccgcagcatccgagaccattcatacctccgcagggactcgttcccgcacaacctgtccaatcaccgactttgctcaacagtagagtcttcacagttcccagctctggcaggcatatttgcacgatgccgactttgacaatgacgagaacaccctatacccgtgcgtgcaaccatgagctacacgtttggacgtaacgcagatagctcgatcgaactcacgtgtacccatttcattccctcgatggctcgcttatcggccgggatcgcttgctctgcctcgccaacctccagctcaaaccgatcggcgacgaggtgacgtctcataactcgaacaatccgaacttgttggctagaagtcacgaagaccagtttagcctggcctacaaacgggaaagtatcgaatcaagttgtacgatcaggcattgcgggttgcactcacatgtcacggcatcaactgtttcccatcccgaccagcatagttccacgatccactcctcgccgcccatctgacctgtccatacccgtttgacatcatcatcggtcccgacgctggaagtcaatccaaaaagttgagcattacccgacacaggacacgccataaagctgagacttgcctccaaaactggagctcgcctttccgattgccgagtgccaacagggaagcggagggtacccgtccaatcggtcttccaaagcagggcgcgggggaccaagcgatacctgtaaaagaacgaatgaatctttctggaaccaagattcgtctttcagcggcaaaacgctcgacgcacaattcgtcctcagttcggccgtcctcgctcgatactccgctttcagctcatcattggcatcttcgtatttccctggaggcggcagaggaccttgtagccgcatttgttctccggtaatgttcactagtcgcttctctgcaccggagacggttcctttagcgaaattatacagggtaacatttaggctggaatcgagcaaggcgatgatagggctgtgagcgtcaaaccggcagagttagtcgcagtacgaacaacgccgacgtccgcttcgatctcacctgccgaatgacaagtggtttggggagctggtgatacccttgatatggtatgaccgaggacgatagaaagtcccagcatcgcctttatacgattatgtgggtcagcttcaattccctcgaatcatgcataccgctggaatgcccagacccctcctcactgtcgtaaaactcgacttgttccaacttgtcttcaatctctccatctaacctgtcgattgcgaacttgttgatatgcataggaaaagcctgatccgtctcggggggcactgcggcggtagaatcagagatgacgatctggcgaggccgcggcgcaggtttcttgcccagctgtgagtcgggggagatgtagggtgggagaggatggtaaggtgtctgtgatatcatggcgatcaggaagatgagtatgtcgaccagacctgtttcacgacgtgatcatactcacggcgatggtgacttgaatagagctgtgacagacgatctgcccttgcgtgttccaatagagtacgccgggtcgggcccaagtattgacggatcccaattggggataagctgaacatagcgctgagctcggactgctaggtccagcttcggcctgcttgacttccgctgcgggtgggaaggattctgtagcgtcgaccgtttgcgatatggacttgtaagctagacagccctccaatgggcgaacggaacccaagcttaccgtccatcctgcgggtaaactctgtcgacgtgattgcaccagaaactcaatcaatcgggtggaatctggaccacaggtcgagaattcagcagtattcatacgatctgccagacgaccgagagaagtagaagatccagctagcagctagcttctcctggatgtagttgttgatgatgcctgtctgacatgtttcttattctactgaacgccgagccccctgcccttctcgacttgcagtcactttacgttatggaactcgcgctactagctactcgtctcgtttcccgtctctcgtctcggctcgtcgtgtcaggctggctgtctcattttgatgaaatcccgtgtcgtaagcggcggtaagcagggcaaaacgtagggggtcgggcggcggtggcggcaagaggagggaagatcgagtgatcgtttgattgaatccggtctgacacgaggttcaccgtcgacacagagtctcgggtcagcgtttcccctggactacagcgtgtgtgtgtgtgcgtgtgtgtgttgacgtcggaatgaaaacaactcattccggtcagttcaagacttctttcttctgatcacgaccgggacgacttccacttcattcctctctcgatcctttacaaattacaaagtacgcctcctcgctgcatttactcgcatcaacgctccttttctacgcccgtacccatccactcgtaccactctttcaacgcccttccgtgattaatcagaagtggctttgaagcacagcccaaggtgagttcacggcagctcgccaagtcacggtcatcaggactgctgtgccgaatagtccaacaaggggatcgtccatataaacctcgatgggtctatttcttatcacgatcggaaagctgactatcgcctgcgtccatgatcgtacccctcgttgcttgttttcttcccacaatcaccttataatagcgacttttgatcaatcgcaagagcatctcatcactctcacaacccctttcgataatctaacctattcaacatgtgtggtatgtcaatcacgtcgtaatccactgttacatcgatgtggacggatcctaagcctttaattcggtatatctttaggaatcttcgcttactgctcgtacctctgcgagaaggaccgaaggcacatctgtgaggtcctgtgcaacggtctcgctcgtctcgagtaccgaggctacgactctgccggtaagcacatcgtaacccagatcagatatcaaacccacgctgacttctcgtcccggtgctactcgcaggtatcggtatcgatggagacaaccctgactcgcccaccatcctcttcaagcaggtcggcaaggtcgccagcctccgcaagttgatctcccagcacgcttcggatgccgatcagtcttccaacgaggctgccgcttccgacgccaaggaggcgaccaacgtcggcatcgtcgacatgggcaagacgttcatcacccaaacttcgatggcgcacactcgatgggcgactcacggacagcctagcccgctcaactgtcaccctcacaccagtgacaagaccaacgagttcagcttggttcacagtaagtcgagagctggacgcgctggatgcaatgacggtttgctgacgggaggtattggtcttcttttgctagacggtatcatcaccaactgttagtcttgatccgaacgtttctcgcatcattgcgtcccactaatagcaagtcccgacggcgatgttttctccctgcagacaaggagatcaagctcgtcctcgagaagcgtggatacagcttccacaccgacactgataccgaggccgtcgccgtcctctgcaagtacatctacgactcgcagcccaacaagaggttgaactttaccgacctgatcaaggccgtcatcaaggagttggtgcgtaaagaccactcgagtgggaaaaaacagacgccagcgctaattcagatttatccaacccgacgactcgcaggaaggttccttcgctttcgttttcaagtctcagcacttccccgacgagattgtcgctgctcgtcgaggttctcccttgctcgtcggtgtcaagaccgacaggaaactcaaggtcgactttgtcgatgtcgagcttcctaccgccgacactaccgagaagcgtgagtagtaaacacaggcaccaactccatttcgagggcagcacgattgatatacatgttctgatctttcagtctccaacgataccgagaacggtggtctcttgactgttcccggtggaaacggcgagcccaagcttcgtcgttcgcagtcccgtgccttcttgagcgaggacggtcttccccagcccatcgagttctttgtcgcttccgacgcctcggccgtcattgagcacaccaagagggtcttgtacctggaggacgacgatattgctcacatcagcgagggaggtcagtaacagccatgagagatgtgagatttcatcttgaaacttcgaatctgacctgttcgaaccacttggtagagctccacatccaccgactccgaaaggacgacggcctttcgtccgtccgagccatcgagacgctcgagattgaactcgccgagatcatgaagggccaatttgaccactttatgcaaaaggaaatctacgagcagcccgaatccgtcgtcaacaccatgcgtggtcgaatcaactttgacagcaggaccgtcaccctgggaggattgaaggcctacttgcccgtcatcaggaggtgcaggaggttgcttttcgtagcctgtggaaccagttaccactcgtgcatcgccgtgagttagcgattggaagcattcgcgcgatggcccataattgactttacaacatcgcgatgataatcaggtccgacccgtcttcgaggagttgaccgagattcccgttgccgtcgaattgggtgagtgcgatcgtgacccacctgggtcttgtttgacggggtctaatcggaatgttcgttgcagcctcggatttcctcgaccgaaagacccctgtcttcagagacgatgtggccatctttgtatcccagtctggtgagactgccgataccattttggctatgaggtactgtttggagaggggagctttgtgcttgggagtcgtcaacactgtcggagtaagtctagatggcgaggcctggggaaaaagaccaaccctctgacaccaggagttattttttcggatcagtccaccttgtctcgtgagagtcacgctggtattcacatcaacgctggacccgagatcgggtaagtagtaaatggtgccacaagccaaatcactcttccgctcatcaacgtccgcattttgcttctcagagtcgcctcgaccaaggcctacacttcccaatacgtcgccctcgtcatgatggcactccagctctcggacgattccatctccaaggaggagcgtcgtcaacagatcatcgacggcttgcacgagattcccgctcagatcaagggagtcttgatgatggacaaggcgttgcagcagttggccaaggaaactctcgccaaggagaagtcgctgttgatcatgggtcgtggttaccaatgtgagtcgactgtttctgcttgcaagagtgcacgtacacacgtgctgatacaacgtctcacgtacttttcagtcgccacttgtttggagggtgccttgaagatcaaggaagtctcttacatgcactctgagggtgtaagtcgagctttctccattccgtaaagataaatcaactgatgcaggcgctctcgaatctcgtgcccagattcttgccggagagttgaagcacggacctcttgctttgatcgacgagcacttgccgtgagtctaaccgccatggttgattctcggcgaatgaagctaacggctaggcgtacgatgatagtgtcatcttcatcatgacccaggactctttgtaccccaaggtgcaatcggccttggctcaggtaaccgcccgaaagggacagcctagtaagctgcaggaggttctggcgccttttgaaccgctgctcagttgcttacaacactcctcgctccatcgcagtcatcatttgcaacgacgatgacaccaccatcagcgaccagtacaggaccatccgagttcctctcaccgtcgactgcttgcagggtctgatcaacgtgctgcccttgcaattgttgtcttaccacctggccatcatgaacggagtcgacgtcgacttccccaggaacttggccaaggtgagtggcggatacgcgtttcttagactcgcacatcttgctgacgtgccttgttctgcttcggcaattttgtagtccgtcactgtcgagtagacggtccacaagcaggttcagaacccgctccttgcgagtttgccaaccggtttcgactcgtttctccggggccttcatcatattctcttctggtagcatgacacggacgatctcgaccaaccatacgacccgactgtctttacacgctcggtcaatcctttctctttccgcaacgcgatcgatccggcattattgtcccagtgcgatcgacagcgacggctagaggcagggacggcctttacgaaagatcttttgtgtcttgtacactctactctgtataccagtgggtttctacatcgggccatgacaaatagatttccagatttttctctcgtatgcgtgtctactctgtttacattttgggatggcgccggcgggatatttgacgtggggaatacaggtgattacccaagaaactcgacgtggggggtgagattgcgtcaaggggacgatccgggatggcttggggggaagtgttcgggacgagagttgcgcgtggggataggatggggaatggtgatggcgctctcgtcagcatgacaacgcaagtatcttacatctgttttgatttgttatgatcgcttgctgatgcaagacctcctcctgacgatgtggatcagagcatttgcggtgcgagattcaagctcgtcttgcgattcctagaattcgtagatgccacaacgcctagacaatccgtatcgctgcgccgagcgagttgtcttcgaggtcgtcctcgaatcaagagagtgtggaatctccacgaaccacaaccttgtcgcaggcgcggtggccgaaggagggggttgacctgggtcaatcagagtccgcgccacggggccgctcgtctacgtaaaccctctctcgtaccctctcctcctccgccttccttgtgccctttcggtcgttcctccttgttttcccatggtcccccaaccaggattcacccgttcgaaccgttcccacaactcgactacacacactttctagcacggttactccctcacattcccgatactcaagagcagcagcggtattgtcaacagcgagcccacatttccctcattcctcgcctttggtcgtctgtttatcactcacctcagcacgcacttttccacggcgacaccttcttcctctctcttgcagacgtagacacactctcgttttggtactcggtttactctgggacacgggcattcggtaaagcaaaacagctcgttcagcagctcggactttccgaacatcctttatcttggtcttgcatactcggtctaccgctctcaccgattgagcattacacatagaaaacttggtatattcgaatatcaggacgacccgaagcgagttagccgacccctccattgcaacgaacaagatctccacgacattcaaacaagttcgaccatggcttcacctcagcccgagttcgcgttcgtgacccttctcaactcgtcctcttacctccccggagcgctcgtcctagcgcactcgctcagggagcttcaccctcaacccaggaccgtcgaattccatacggtctgtttcgttacaccggagacggtcgacgtcgagagtatcaagcagttgcgatcggcgttcgatgtcgttatcggggtagaagtgataaccagtggggccgaaggagaggctagtttacagcttatgggtgagttggggcataggatcaggacgctatcgtttcagtgcagtgctgacatgtctcccgaaatgtatgacgtttgacgtcttcactatctctcgaccgacttgtctttctcaatgccaggccgaccggaccttcactctgcgttgacgaaactccacatcttccgcctggaaggcaaatacaccaaagtggtctacctcgacgccgatgtgctccccctccgacccctcacccaactcttttccctgcccaaccggttctccgcttgccctgatagcggttggcccgattgtttcaactcgggagtcatggtctttgaaccgaaagagtctgatttccggggaatgatgaagctgatggaggacgccaggaagggggatgtccagctcgagggcatgggaatcgggagtggaaatggaagctttgacggagccgaccagggattgttgaacgagtggttctccgaagaggggggtggtggggattggaacaggttgtcgtttacgtgagtgcttgagtctcgtagacaggtcgtcacattcacatcactgacgagcatcatcgctggagatcagatacaatgttacaccctcggcggcataccagtatgtcatgtaacgttgttacgctaacattcgcaaactcatgtgaaaacgcttccgcagatacgcaccggcttaccgacgatacgggagcaagattcattgtgtccatttcatcggaaacaataagccttggagaagcatcgttacaagacccgctcgtgcaccgacgccgaacatcaaggacatgccgttcgattgtgagtatttcctgtccggaaaccatcatccaacacgatggcagctaagctgacaacgcatcctgccattcagatccttctttggtcgatcgctggttcgccgtatacgatcggtatatgcgacccctcggccagcctatcatcaaccctatcttcagcgtacctcagaatgtcgctgtttggaacatgccggccctatcgactcaggaaggccgagatcagatcgaccaaatgaacgcttccccgcgcgtcgacgcctcggccgtcagtatggccctgcacggaacggacgcgcagggtgcaggtatcgaggggacctacttcagcttgccccttgacgggagggtggatcttatgcgtcctcaaccggtcaagccttcgattccgacccctgagaggaagcccagcttggcaggatcgccccctatctatgcccaatctctgcctcactcggcacccattcatcccccggctcgtcaaggttcgccgcccatatcggacacttggaacgctcaattcgactcgcctcctcgtcgatcgggtcctgaattcggcgagatgaggcaggggatgccggaaaattacgaaaatgcttgggataagccgctcgggcaccaacaacagcaatccgaggactggaacgttgccggtagttatcctatcatcccagatgtcgtcaaggaggacaagtggtacgcaggagctgccgatggcaaaccagactactccaaggtcgagaccgtctttccgtgggagaaaaagcaaaggcagccaccttcgcgccactttcccgccagcgatcctcctcctccccgttcagaaacggtccccgtcttacgcctgcaactgcccagtcctccagctccggaagacattcgtcttccgctatctaccgccactagtccgttcggccagcataagaagccggtgagcttccaacaagccatggctcagtataccaacgcttgggacatcccctcgattcaaaattacgccacccgcttggccggaccgaaagagagaaaagctttggcgaagggcatgcagaccccggcgcttgagcgagagaacgcacaaggcatccttctggcggagcccgagcccaagcaaaagagcaagaacccggcgccgagccggccgcatgccaagcggaataggcgatcgtccgagtcgaacccggccgaagcgagaagtgaaggcagtcgagatggtgatgacgaggagacgacatctggaagcgaaaacgatgatgacgaagagcggtatccgatcatccgtcgaggaggtggaaccggtacaaggccgagccattcgagaacgggcagcaaattgtcgtcttcaggttcctctccgatgccgtcccccggccaggataccggatcttcagggagtggcgcaagcaagcaatatactgggcgaagcgtccagactgaccctgtccctatgcaagatcaagtcgttcagacttcccctcagcagcgaatggcgcatctcgctgccgccaacaaggggactgggccttcgagctggaagttcggagcaaaggctgtcgggcaaatcagtcagggtaccgcatctcaaacggattccactgtctccactgtccgtccgaagcccgttcgacagtcatccgaggagacaatcacttcggcgacttacaactcaccgaggaaccagtctcagcctcgtatcccggatgaggatcgatccacgtcatcatcgtcgaacgaagcgaaacctagagctacttcgagaattttcgatccctcgacctctatagatgtgagtagtcctcgtaaggcgacgttctgtcctgcgaaatgcgtatcgctaaacgggtttgctgtctttaacaggcccgaaggcgagacaccgtcgaggtcttgtcccgattcatgagacaggctggcggtcccgcaagcggtggccagcctcctcgaccttcttaattagatgctcatcttcacgaccaactttagagtgtttcgcatgtcttatactggttataccatataatgatccccatctgttcagcgttctgacccaggattcgtttcaagaccgtttgtttgaccgcgattctcatccgaatttgctcccgtagaccgttcggcatatctctcgcgatcactcatcatgccctgtccttgtatgtctgccaggcattggttttgacggagtgtcttcgcaaacctgttgagtgattcctgtagctgtgatcgagatatctggggatctctcacggatctccacaggaccaacggtattcacgataattctcgagaaggagcgagctccgacgggaatttggaagccggaacgatcataatcgattgcatcgagggcctggttgttcaactctaggacgttcttagtcttagtcgccgcggaggtgtaatacagatgtctgacgctcctcccctcccagagctggcgcctctctcggatccgttgtcgctagcgaggatctcggtcttactggtcccggtcggggacatctctcggagcacttgggacaaatggacctctcaaatccgacgcttcactgagctaagactcaacgatgtgccagggacaagcgggggaccggcttcaaaaggagacaagggtatgtgacctgatctcaatcacttttgcctaacatgcttgaaggctgacacgaggtacccaacagctcgctttctgcccccctcttcaccaccgccgaacacacatgtgcacttggcattcaccacggtgccaccgacgaacgacttgctacccctatctctcctgcaagtatcagcttttccgttagctgtcatcggggtcgccgacctctcagacacaaggacgaatcacaatcagaagattggacaatttcaacaagtattgaacgatctgcaggtcaatcatgccaatggcatggtctatcccttggccaggcgttgtttcggtgtcgaggaggatgtttctgctttcccacttggctcgactccaaaggctggcaactttcccaagcagaacatgtcgacaccgaacctcccagactcgtcctctagtacgccgaggcgggtcgagcagtccgcaacgtttgaagggatggtcgagatcgacgcatctgacgactctaacatccagagaccaaaatcccaaatggcagatcgcgacgtcaagatgtatgatcgaaagggtcatgaggagaagatggtggtcattcccaaagacggcaatgtcgagatcgtcctcggcatgttaatggcagatctcgttgccagcatcctcaccgagttcggcgacatggtacgtaatctcagatcgggtttcgtacaattctcggctcagtctttcgccccgcaacaggtttctgcattagaaaagcctgctggcacccaaactctgcaggcctcgatgttgccgacactgacagtcaagagcgtacctaagccggtatttccgatgtcttccgctagctcgatgggagattcaataacaaggccacgatccaccaactactctctaatatcggtttcgaataccgcaaatccagccactcccacctctgttataccgtcgaggccctcctccgccaccgggtatacagttcccggtgtcagcggcccaggcaccacatccgccgtaccagaaatccaagatcgttcatctggccgtccgcagtcagtgatcggcactgcgacattcgggggtgatgcgacattgcgaggcttcgggaacgtgccgggacccgctccagcgaaaaatgattcgaagccgaacggcaatgcttcaaaacgagcgagtactggctttagtctcagtaccagcatgggacgggtcatgagtggctcgaagcacctgggtggctcgatagaagtcgggtctagcacaagtccagtcgggggcgtcagctcaaacactgccaccagttctgccactggccgtctcaaaaaggtcacagcggacctatggttgctgagcggtagactgcaggaggccatcgccagctaccaagactgtcttcccttattcaaaagtcaggctgataacccttggcatgcttccgcgtgtgaagggcttgccacggcaacccttctggaagcttgggagacccgcgattctgagcacgggaacgtacccttcctcagttctccagtcctctccggagctcacgagtatctgatgcaagggttagctctctatggcaaatcttcttgtccccccgaatctctatttccgcatggagccgagtcaggcgaaggtgtgatggccaggctctacactctctgcgcactgcggaccgcacgtcttctgcttcactcatgggctgccggaggattcggagcggcgtcggtacaatcgctcatatcaggacgcatggcacgaagctatcctccagcggattatgctcatcgacgcagggtatttttgaagctgacaaccatgtcgaaaatcagtcgatccctcataacgcgaacagcagcaatggctcatggaccttggacccgctggctgccggacagcgttcagttggacgtcctggtcgagctcgcgaatatgcaacggatacttgggttggatcgcagagaaatgatttttgaccgcgagttgtccggcttcggggttacatccatcctcaaaacccgtgcgggacagacaaagatcgttcaaggcacaagaaagcgtaacgacagcgatacatccgaacgaagccaggactcggcgctatctgccgagactacggcctcgagcattgcgagttctcgtaggatcgatgctccagcttcgtctagtgcagcgggcttcatagcgtcaaagcgtccagattcggaagaaggcaccgatgcgatcctaaatctcctccatcgaacacttgatgttcttggacttgatctagatatgttgtacgaacctcccggtaccgatgctccgcaagcctctacgtatggctggcctgagctgcaagtcgaattcgtgcgcgacgctgtcacggcagttgaagctcttccaggtgagttccgcgactttacgactcgtaaatagttcgctgacccaggacaatttgggaagcagatcacctcaatatcatgcgatttactgcggttgcgctacgaacaatgtcgatgcaccttgcaccgcattctcagctgtacttgtatcaggcttatgcaagagcttggagcacagcacaacgtcgcgcgatcgcgttgccacctaggcaatggtggatcccggatggtctgttggtccgtctagagatcactccgtacgcataccacaagcaacgatgggaaccagttgaattgataatactgacttacaatgtcatcgctcacaggatgcccgcgaataagataccttacgagcaaagtcttgcgactgctacggccagagaacaacgcttggaccccttcctatacaatcctagagctaaaacttcagcaggtggcaaagtaagcgctctatgttggctagacctcaaggatgacacacgtcatttgaactgacgacgtcctctacgctttcgaaagcttgtgttcgtacaagatgagagcattgaatgcgtcgtcactttagcaaatcccttcagtttcgacatcgagcttcaggatgttgcgctcgcgtaagtagaccaggcgccgacggaaaccattgcgacgagaattgaactcaacagtggcgacctgatcagaactactggagttgcgacaaactgcccgtccttagcgttagtgctcactgcagacagcgtcgttcgggtgtcgttggttgcggtagcttccgagccaggggagcttgcgatccaagggattcggatccgcctaccggacggccagagcgagatactctcacttccacaagtcggtagtttgggagcgagagctgatcaagcaaaagatcagcgtcaagataaacccacctttggaacagattcacgacctggtgtgcaacgaaggaacaagcaagccgccggccgtttgcaagccagtaacaaagtcggcctgattctttgccaagtcataccatctcaacctttgatgtggatccgcgggaccaatctgaatcacggctctttgatatctttagatggcgaagcgtaagcagtttccaactagccgcctagcgtatctcagccaagctgaactttcattccagttctgctattcgactgattgtcgagaacgcttcatcgcaaccaatcaatttcctgaagttaactttcactgacaccctgtcaacggaaagtgaacttctactcaacgaagctgggctggaccctattcaagcgcacatggtcgaaaccgagctgcgggagcgtcctgtattgctttgggaacaggctgaccagcccgtttgcattccgcctggggcgcaacagagtatttctatccgctacttcggcaaattcggatggtgagccattgcgctttcaatctgcataccggttctgacattcttatgagccttgcagtgaacatgccgttatccgcttggactatggcaatatcgcagatgcgaactctaccttctattcccgacgtattgctctgccgatcatcacgaccgtcgagcagacgctcacttgtcagagactgaatatccagccgattggtcggagcggaccgcggccgaattccgacaacactgcgggaatcgaatcgcaaagcagcctccggagcatgcttccgaaacatcagaactcctttcgccatgatcgaacatcacaggatcacttgcaggctgcctttgcgaaagtgcgcagtgacgcagacacgtgtctaggctcagccgtgttcacgaatccttcggatcaagctctcgaagtgtgcctcgagctgatccggggttcggaaggaggtaaattcaaagttcaactcgtatagccctcatcccggagcaaactcagatcctgacatttagcaacaacatttccctcgcagaaccaccgctgatcttgagaagactgctcgcagcccgagctagtgctcggtaggtaccacagtaggaaaacacgaagcagactcactgaccaggaatgtgacgctttgcataggctcgttttccctttgaagcgttgctccctatcatacaaagaactctctctagcaattccacagtccgatattcggcagtttgtcgttagcaaaaggaagactagcgacaaggagaactacgaagccgtcgagcacttctggtacaagcaggagctactgaagtcggtgcgcgcctggtggacgctggtgagcagtctccgtcatgagaccatcttggtagatgatgcagaccgctaaggcgaataaggtcctgcggtcaatatagcccggatcgaaccgatctggagaaatcgggtttcatcggctcggtctggaccgacgagctgtcgatgccttccggcaggcatcgttcgatatagacatgaatgtggaatataatgacgatagcggcagcaagatcctatctaacgtaccaaccagtctgtgtttgaaaatcaacactcccggacggcaaggtaaaatggcgtcatgtctagtcgggcacttcatcacagctgaccagaattgataaatctgccacagacgttcagatagccacatacatcgtcgacatacagccttgcacgctcgacagaagcagcaatccccaacatttccagacggatctcgacgccgtttcacgaaatttcatatacgaaggcgaattgtcaggatcgctagctctcttggatggcaccgcaggcttgagaatccgatctacattcttgtctaagggcctttacgagctggacctgacggtcaatttggaggcgcaaggctccgcaattgctgcaaattggcggcgacagatcacacgaactgtacgaatcgtatgacaaaaacggctatgacattgtatgtcgctcgaggcggactctactactataccttacggcatgtcatcatccaattccataaaagctctcagccctgttgggctgttcggtgcggtggcggcctattgaggagataagtgcgactgagtctatgttggacctcaagcggaggaaacggtgccacccacatgacccatgaaaggcaccatcggtgtcgcgggagtgcaaggctcaaaccggggcgaagccgggcacgaaaccaagccggcttgctccagagattgtcgcaactgctcggcatgcatggcaaagtcggtaggagactgtgcaggtgcggtaaaatcgtgatgctgcggctggaacaaaacagggtagctgacgaagtcaagctgcggcattggtgtggtcgcacgaagtggagtcaaagcgggcatggcgtctaggtcgaaattttgagtaccctgaaacatttgctgcactagcctaggccgaggggctggcgcattcgccgcaacagcattcacaggatggtacggaggtcgaggagaggctagtggttggcgtcagttctgggcgcctggagatatctgtcagcacgtaccgaagctacatgattcacggtactgtgtagaagcctgcgtctcgggcgggatgactcgtcttttgtatgggccgcgtttcacacctctagctcgtggctgtcaccaagtctgtcttgggtcactgaagctcaaaggttaacatttgcgcttgcttacttttctggtagaattcacacaatctttgagtccatactggtatggatgcaaccgatctgaacagtctgtataagcgaatgcttctaaagctgctcactcgtctgcacctgtcgcatggtctgctagacaaggtagcatacatcagtatatcggccgaaccgagtactatagcagagccatacctctcgtttgtgcattttttgcaagcttgctcgatacgtaagcgagtgaactatgagcttgccaggtcatcacatgaggtcgtttgggtctcataccttgttgacaattcgtgcaagcgtttctgaggaggaagttgaggcaggtttgcgcgcatagacattgcggtaaaagaggcacacttacttgacttgagcccttttggtgtgcggtggaggaacgtgttgttgtgtcttgtgcggactacctgccgatgcggtactaggtgtcaaggggtctgtcgatctcgaacttgcccatttgccgccttcgtcgtagcgaggacgaatgactgcttctaatgcgtggttcggctggtccggatggcacttttgtattgcgtacgagctcggccctgttaaagcagatagcacaccaccatcacctgtcgtggaaagattgcggggccaattgtttcgaaagtcaggtccaggacgatatcgcccactctgcgcgtaggcgtattgcttgtccatttgttgaactccctttttcgttggaaggctttcaactccggaaccgatctcacaatacttgtatcggcgctcacaactgcctgcatagctctttatatgctgctatcaagcaaagagggctgattcgcatcgaggcttcctcatcggagactcctttgtgcggcaaggatggcgcgatttgtgtttcacagctcatgaccaaccgcggagttcgacacgcgaaagggtgaacccaagcgagatacggggtatcacactgctctttctgtcacatgcatgagaccggctatacaactgattctgaacgtctaggctacaggaagtatggatgaattataagtgcacagtaacattagctacaggtcatgtactgattgccgtcaatcttgttcttcaaaaataaattattttgggtcagagtcacagtgtagatatcatccgccggcttcactcactgtcctcgctcgggatctcgcatgcgcaagactttcaccgttgccggtagcttcgctcccgacatttcctgacacgaccgattcaatcagcttgcgttaccgcggcagtatgtcaaacaatgcgttacctgaggcgtaatcaaaatgtattgacgctcatcaccgtgcttgcccagaatgtttacgccgccattggaaagagccttgccgaccgaaacgtctacccccgtggcgactcgcacctatccacatggtcagcaacaatcgaataccgactccaaaccaaatgaaagactcacgaggagggacatggcaagctttcgattctccgcgtccatgaacacgtcgaattcgtcgaggcatcgaagggggctcttgacgttgtgccaaatcgccagaatcaggcataaagtcgtgaaagaagtttccccaccagacagcgcccgcgtgtctttttctctgccttgaatacttttctgctgggaaatctctgtggcgacctgctcgagggacaaatatatcagccaatcgaatgccgttcagtcaacccacgaattttcaccttcatgtctagcgtcgcaagagtgtgatcgatgaccagattgccggtaaacccacgcacttgcaaatactctgagaagccgtctcgtgtccgcattgtcgtttccgcccggagggctgtccaatcccgtttccgttgattaacagtcgaatgtagtcgctgatatccgtacgaaggccgtcagcaggcacaaaataggtttgtccggttacgatactgttggctgacctgtaccgccgcggtcgcttctcgaacgatggtcttggcttgagcgtatttaccagcggctctattatagttttgaacgactacctccaaaggatgcttgaaactagagacgacctccgtcgtcagtgaattgttcccctatccggagaaagtctttacgcacttggcattgcccttgtccctggttctctccgcagcggccttcttttgcttcaacctttcaatgctctcggtaggatttctctcctcctgacagaaaattgcagcttttctggtccattcctgggcgcagagaaagtcaataaaccttgctggtggccgtatgctcagtggcggcttacatcgagcgttctctctgctgcttgtaattctgtcagtttggtaacagccgtttccgccttcttagcgcgagtcgctgcgaggttcttttgccctttcaggaggtcatctttttggctcttcgcaagcgctgcagatttctgtgataccgccgagttcagtaaagttcggatccaaagttgagctggacttacagcaaggtcgttcaattgttgcgcgaaattgtctcgtcgagttttgagctcctctcgttgtactttgagttcctctacttgcgcgagcgttgtctgcagctgcgcagtgagattgaggtactgctcatcttccatggctcgggcctgacgtatacgctaatgggagtatgggtgctcggggtgagcgcgagccacggcgtgcgctatcttccagctcacttcgatctcgtccgtgaaggttgatacgctcacgggctcctcatctgcaagttcagcccctatctgctgaatcttggaacgtagctctcgctgccagtttttcaactggttcatgcctctctaaatagtaataccattgatgaggcgtcacgtggaatcgagtgtgctcaattctcacctcagcttcactcgcaagctccccaaagcgattgcgatctgcctccagctttcgtagttcggagttgacgtcttgaatttgagccaatgcattctcaaccgcgtcagaacgggttctgatcgcaagcggacggcaagcatcggtgggaagatagtcgttagcgagcagccccaagcacacctcacgtccgccttacgctatttctgcttgaagatcggtcgaaagcatcgaagaacctccccagttgttcagaggtgagcttgattgccctccgctcctataagcccggcaagcacacataagtagacttcgagtggcgaaattctgagcagacttacgcagtaccggttaccctgaacatatcagcagcccaaaaggttacttgtggacccgtcatacctcgagcagcatcgtctgcctccctacgagttggcgacacgaaaactttctcgattccagaagcattaatcaatatccggatgacttgcggattgtcaatctgaggagcttcgtgtcaacagagaagagcagctttgaaataaatctgacttgcagcgtacctcaagcactgatagcaccgtcttttgctggccgctgagatcgcccgccgagtaatcgaaaagttcgccggcatgagtcagtatcggaggaaatgccctccggtcgtttttgccagtgtcgaagagactgaagaacaagtcgtctcaattgggcgaaactacattggatttatgtgcagccactcacaccccatccctgccctggcaacgcttgaagatttgcatgagttgggctcggtcactggcagtcgtgacagcccaggatacgaagttgatacccatggcggattctatgaccttgatgtatttctcttcgcccggcttcaccttgacgtgcaagccgagcggtccaatcggctttccgccctgccaacggaatttatcgatttctgcatagaccgcctgtaggttctggccataccgattgagacgcgtctgtccattaccggattgctcacgttgcgccgcggccagatgccccttcgctcgagagacagcttcatcgagctgttgtttgtcgccttgacacttctttagagcggttgtagcggcatcgaaggattttttggcagtttctactttcaatgtttgcgcaggcagttgcgtctgaactttggccaacttcgcctcctgttccgctttgctatcgcgaagcgcttgctgcttttctgcgaatccgacccgtcccgttctttgaatctcttcgtccctcttctgctccagctcagcaatagagcgctctttggcgttcaacgaagtcgacaagtctgcgatggctctctgtgatataggaccagcaattcattacgaccccttaataccttgttttggttgacacgcactctgtctgtcccttctttcgtcttggtctccttgtacacatggatgaccttgcgcagatcctcggcgaccgatccattcgaatcctggaagtctccgtatgccttctctgcctcatcgatcaacgcgtccgcgtccgcgctacttccctacgtagcaatagcgaccgcgtcaaatgctaggcattgcgcagcgcatgactgtaggcttactgcaaagtcgtccaaacgtttctgtgcgagttctagctcggcatgagccttgtctgagtctgctcgcagtttagcaacatcctggtgttggcagtacagtcagagcgagcttgcgccgagtgcgaggatcgtgactgactttgcctttatctctaacatacgcccaggccagatctttttgcgtctcctcgatcaactcttcttgcgcctggatgctctgcatatgctcgaggatctttttccacttttcggatgcgttaaatagatctttcaatcccgctttttgtcttccaaggttcgcgtcgatctggtgggttttcacctcgagcgcattgtaatcgttgatgagtttttgcagctgtgtccctttcaggaataactgtcgcgagaatagacaatggtcagcgacgatcagtgcaacgtcggcaaaaaaagccaagtcgacatctaagattctgacctcgtatttcttatgcgcgtcactcgtgctcaagaacgcccggctcatgtcttgcgtcaagatcgtcatggggttgtcgacttgaatgtcgaaatggtccatcatggcggtgaccgtttctttcttcgtcgagagtggtttactacgctcgctgctcaaggaagagcggatgcgccaagagcttgctccttctctagccaggactctttcgatggtaatctcatctccccattcgtgagctcgaaacggactacggccagtgttcttgagcacgattcgtactaaagctctcctgtcaagggcaattgtatgatcgtgagttgtgtttctgccgacggtaactcgatccaggtgagaatacctacggagttccgcttcgaataagatcggtgagcccggatcctcgtccggtgctgctggtctttcctcctaggacgatcgtgatcgccgtcagaattgccgacttgccacctacgaggcggaatgcacaaggattacatcagcgggccagattgactgtatgctttcctctgcagactcactcccgttgtgcccgatgacgaaattcatgttctcgccaaaatcgaaggaaagcctctcgtggcacatgaagttttccagatagattcgcctatcgatgcaaccctcatcaacggtcctgtcttttcagaagatcgtacttcatacacacttgatgattccgctcgagccctgcatcaaggtaactttgatcgttagttggtccaggcgatcggatggtcgaacaaagatgtctcactggtccattgggcttgcccacagtgcgtcttcgctcctctagatctcgctgttgtctacgatcttcgatgacggccgctttgatattggaccttagagctgccaattcctctgtcggaccgtcttcatattcgccatcgttgtccgagtccggatctgatccctcgtcgcgaccattagcttgttccggctcgtaagcttgtggaacgacatccagtcggctccgcttctgcttcaaagttccacagtcataatttcaacatgttttgagaggtgcgagtgcagctgttgcattccagcttacagagaatctgccattcacgacatcctcgtcgctgtcttcttggctagatggcggagagtcggcggactttcgcttagccaccatctcggtgaagagctttcagggacaattctatgtcacagcgaaaattagcagcacttcagagtagtcgtcgaggtgtactgagagcgtatccaggtcggacatctacgtaagaaggcctcatcaaaagatgtccgggttgatttcaaggaaccctgtcgcgttctcaagaatcgcgttcgcgacggtcaaggccggggatatgagcggagttaaaaagacatgagatgtccgtggacgagcgatccaaccacacgggcggggtgttccctcacatccatcctcgaaatcgacctcttctgtcatcctccttcatgacctagcttgatcaagaaagcctcttcgcttctgcttcttcaaagaatagtcttgatcgagttagccagttcgagatatcgatcgcagtagaagctctcgctcgaatttaatccacggcccgtctcgacgactcatcggtgggacagtcactcgcctcagcataatcccggtcgcctcgcaagtgtttagagcagcgttcaacccgtttgcggagaccctagcctcagactggtctggaccctcgacatctaggcagaatccaacacagagaagggacaaggatacggcagtgaaagaatcttatcatgtctggtacatatcctctcttctcgagctcttacccgctcctgaacgcaggctagactatgggttcccacccttttgcttttccccattctctattccgatccttgtctatgctgtcgaaatgactacaggtgactacggctacgagtatgcgacggctcccggcagccagctggacggcgcggacagctatcccgacattgcggccaaacaggaagagtacgactacgatatggatgattcttccatcccgctcgccgaggacgacttgtggatcgtgatcaatagtttcttccacgagaagggtctcgtcaatcagcagctctcgagtttcaacgagttcatggagacgaccattgtcgatgtcatggaagagcacggtactttcactctcgaccagacatcgcagggaggtactcgagccatggatgcaacggtaagccatgggaatgctctgtgccaacgttggtctgcatttgaaccatccctcacctcgaatctttaccaccccgtcgatagagacgattcaacatcaaattcagccatgtctacctcggacctcccaacatgaacgagaacgacggtcgtgctgaagaggcttatcctcagcacgcccggttgaggaacgggacgtgagtcatgtcccggaggtgccggagatgttgctgggaataccatagttgacaagcgacgactggatacagttacgattgtcccctgtacatgtcggtagcgcagcaggtcgaaaagtacatcccggccagcgaagacgatgaggccagatgggagcccgatggtgattataacgacttggaattccgtcaagcctatatcggacgggtcagtcggtggtgtcttctcatacaggggaagcgatctgactcatgcgcgacgttccttgtgtcgatagatacccatcatggtcagaagtaacttctgcttgacgacacggatgagtgccgagcaacaacaacgaattggagaatgtcccatggatatgggtggttactttgtcatcaatggttccgaaaaggtcttgatcgctcaggagcgtatggctggaaattacgtctacgtcttcgaaaaagctcaacctagcaacgtctcgcacgtggccgagctgacgagtgtgttgagcacgtctggtatgagcaagatgagcaagatggttgtgaaactgttcacggcaaagggagataaacaggtgagtttgcagtcaaaacatcgcaggcatcgcagagactaactaggcgcactcaacagaccggcaacaacgctatccgggcgacacttccttatgtcaggcaagatatccccatcttcatcatcttccgcgccatgggaattctgcccgacgaggatatcctggcgttggtgtgttatgacctggacgacgatgcttttacagacatgttgaagccttccgtcgaagaaggtcgggactaccagactcaggatgtaagtcaatcctactcgttgcttgtcgtggttcctggctgacaggtcttgcttacctcagaaatcgctcgatcacatcggtcgtcgaggaaacgtgggaggaagcatcaaatccgagcgtatcaatcacgctatggatattctcgccaaggagactctaccccacatctcgattgagcgatctggcttcaagcagaaggcctatttctttggttacatggtgcatcgtctcgtgttggctaagctgaacaggcgagagctggacgatcgtgatcatttcggaaaaaagaggttggatttggctggacctctgctcgccaaccttttcaggcagctgtacaggaagttcaccaaggatatctaccgaaatttgcagaaagtaagcatatgaggtagcatatgctgtcaggcagacaggattgcagtattgacctccacgccgttgctccctccctacagtgttccgatcaaggccgcatgttcaacatcgtggctgcgatcaacaagagcatcatcacccaggggctcaagtactccttggccactggtaattggggagagcaatctaaggcgatggaaggcaaggtcggtgtgtcgcaggtactgaacaggtatacctatgcctcgacattgtctcatttgaggagaaccaacacgccgatcgggcgagacggaaagatcgccaagcctcgtcagttgcataacacgcattggggaatggtatgccctgccgagacgcccgaaggtcaagcctgtggtctggtaaaaaacctttcgctcatgtcggttatctcggtcggttcgcccgatggtcccatcctcgagtacatgaagacgatgggtctcagtggactggatggctacgctggagaccccgaagcaacgagggtgttcgttaacggtgtctgggttggtatcagtaccaacccggctgcgttgctcagcaccatggtccagcagcgacgagagggagcactcaaggacgaagtcagcatcgttcgagagatccgagagagggagatccgcgtatacacggacgcggggcgagtcatgcgaccgctctttgtagtggacaaggagacgcaaaaggttcagatcgagcagaacgatgtcaccaagctctccgagtgggcagactaccgagaggctgcgttgtcaaaccatgtcgacgaggctcccgaggagtacatctggcaagatctcctgagggaaggcaaggtcgaatacctcgacgccgaagaagaggagttctccatgatcgccatgacgatcgacgatctcttggacgcgccacgacggatttacgccgccgagaacccgggcgcagcaaagatcccgtcggaattgaccgatgactttgacccgacgaagcggatcgagagtaccagttattcttacacctacacccattgtgagatccaccctagtatgatcttgggtgtttgtgcaacgatcgttcccttccccgatcacaaccaggtgagtgccagactgagtttccagcagcaatgcaactccgctgaccaaaacttcgaccactagtctcctcgaaatacctatcagtctgccatgggtaaacaggccatgggtatctttgctacgaatttccagatgcgaatggatacgatggcgaacatcctcttctaccctcaaaagccgcttgcgggaagtctggccatgcaataccttaaattcgatgacctgccagccggacaaaacgccatcgtggcaatcatgacatactccggttacaaccaggaagattccgtcattatgaaccagacgtcaatcgaccgaggattattccgatcgctgtactaccgtacatatatcgacaaagagaagcgtatcggaggaaaggtcctcgaatcgatcgaacggccctcagcagattcgacactgaggttgaaaaagggcccgagtgatcgatatgcgaagttggacgaagacggtctgattacgccagcgaccaacgtcaatggagatgacatcctgatcggaaagacggctcctattgaggaagacagcgcagaattgggccagaggacagagacgcataccaagcgagacatttcgacacctttgaagagtaccgagtcaggtgtggtcgacaaggttattgtcacgcaagacgatgaaggacagaagtttgtcaaggtgcgaacgaggaagacccgaatccctcaaattggagacaagtttgcctctcgacacggtcagaagggtaccatcggtattacctatcgtcaggaggacatgcctttcacagccgaaggtatcgtgccggatatcatcatcaaccctcacgccattccgtcacgaatgacaatcgggcatttggttgaggcactgctgtcaaaagtcggcgctttgatcggagtgtttggtgatgccactcctttcggagatttgacggtcgagaaggtgtccaggcgtctgaaagaggccggatatcactctcgtggcttggaggtcttgtatcacggccacacgggacgcaagttgcaggcgcaggtctactttgcccccacttactaccaacgtctgaagcacatggtcgacgacaaaattcactcgcgagcccgaggaccggtgcagattctcacgaggcaacccgtggaaggtcgaagtcgagatggtggtttacgattcggagagatggaggtgagccttggggaaagcgcgctgtagcgtatgatcagtgctgaccagattgtcgcaacctcagcgtgattgtatgatctcgcacggaatggctggtttcctgaaggagcgaatgttcgacgccagtgacgcttaccgacttcatgtctgtgacatgtgcgtcttgaagcttgattacttgaggggcaacatcgcctggatactgacctatatttacttgttaacatcaatagttgcggtatgacagcaggtaagccatctaacctactcgatgtcggtcttatggttagaagctgatcgcggaatacaatccatctctgtagtcgccaacttgaagaagcagtcgttcgaatgtcgcttgtgtaacaatcgaacgaagatcagcgccatctatatccgtgagttcctgtgtaaaattctccctatacccggaggatgtactgaaagcgctcgatattacagcttatgcggccaagctattgttccaagagctggcatcgatgaacattgcgtgagtcgaagcacgagcttctctttgcctcgcctggtgcatcgtgactcacaagccgcctcgttctgatttacagcgctcgtttgtactccaatcgaaccccagcatggcgagcgaacaagaaccgcagcctcgctcaaggaatcactgcctagagcttcgttctccaaggcggccatctgacctttcatctcacgaccgtgttgtatcacaaaaagaccgcttgtcattatgtcatgagaaggggcatagccgaaaagacatatatacaaaagaccccctcatcttatcaatgatataccatacataaatccatcactcgtcacgttctctacgaagcgtcgtcgtcgggctcgatctgcctaggcattccccttgccgtagacttgaacgcaacgcttttcgaacgcttcgaccatcaagtccgagactttagggaggaaggcttgcgaagcgatcctatgcagggggttggcgaaggagaaggagaggtcgatagtgagcagggtcggcgagtcgttgtgctcgacaggtttcgttggcttaggggaagcgacagttgttgatgaggatgatgaagagtcggtaggagtagaagatggcgaagtcatgctcgtcgttgtaggatgaggagaggaagaggaggcgggttgaaacgaccctatcggcgacaagcctcgattgtcagcgctcgattgtgacgagcaagagcagtcaagtggctcacaagtcgtctggagattatggaataagggagagtcgtccaccgtagcctgcggaatgtttgagtcggatgagcgattccgcttacaattatcccgcttagcctactcgctgccaactcaccttaaccatctcaccaggtcgcccttcaacccgactgacaaacctctcgacaaaggctccgaagccaacctcgagctcggccttgacatcaaagtccaggccggcctgaaccatcgctttcaggtcctgccgctgagactcttccgacggttggaatgacgcgttcgaggattggtatgatggaccagagggagaggcgttggacaagaggatatgggaggtggtgcaaaaggggatgaaggtcgagtacgaggggatatccgataccagggcgtaaagttgattctgggtgtatctgaggtatccgtatcattgtcaagtcggtcgtcagctgtagactcgtgcgccgacacgtagaaccttttgacttacggcaagatctttctcgcatgaaagacctgtctctcctcttccttcgccgaggagcccggaatcaatttggccacatccgtcaaagagaacaaggtacgtctagtacaggccgaggacggcgaggtatgtcgatcaggtctgttcgtggtcggtcgtgcggacaaggcgatcggtcgtgtgagtaagatcgagggggacaaggccgtccgacggaggatggtcccggtggaatttcgaagcgacatggcaggcgttatcagactgcagatgatgaatcggtctgtaaatgccttttggccaagttcgattcagggggatcgatctggatcattcagtattcacatgccttcactatacgctatacgatcctgacaattggccgctgcccccggtccgattcttcgatgggatctgatctgacgacatcgcgctagggccggcgcggggctcacaagtcgcgcttctagagatacgatcacgtaaagatcaccttccttagggctcatcgagaccgtcaccgataccgacctgggctctcccttcatcacttgagagcctaacttattaggaggtggaacgaagggcttgcgttgtattaaacaatcgccgagtgtatcgatccgctggatgactgcgtgctgacgatcaagacgtgcgaccagtcgcaatacgtactggacgcatgccacgtcagagctcgagcattcaacaacactgtccgcatatttgactcgaaatacagctagcaacgatcatgctgagtagggtacaagcgtctgaatcgcctcgcgatcaaaacgggccgagcctagatagacatgatcgcgggaaaccaaggcgacgggaccgaaattcatgcgagacgacgtctgccttgtcagagtcgcaacttatgcaaccctcgaaacttaaagtcgaccatgacactccatattactgtatatcgacagcaggtccaactcaactctttcgaaagatcgatcataaggtgtttttgggagtcttccatcctcggtagtttaggcggccatcatagtgaagaccccgacgatctttcttgcactggcaccgtccgggtcgataggtgcactatgatcctttgtaaagaggataacaattccaagcgcggggagctggtcaatgatcggccgatacatgctcttcgatagttctggttgacacgccaatctacgcgctgttgacatgctatagactgccgtcaaagataacaatgagaacatctcttcttcggttgacgatctcttcgatacactgagacgagtactcaactacactaacgaatatatttacttggccgaccttctttcaagcagtgtccgtgctcgtcgtaggatcacgccactatgttggcagcgtcgcaaggattctttcggggaattttgagcttgtagtcgtcttttttttcgatttcactctcggtgcgtagtacccagaaagatctcacgaaggatcattcagcgtcagcagtaatcactaacaaggtcagtgaccaccaaaacgccgcggtttggacgacacttctcaattatattttccatcaaacttcgaattccccgtctcggtgcaattcgcgttcattcccggacatcttacgggagaatcgttgtcgcatcaacgacgatgtctacacggaacatacaacatttgattcctgcgagaacgaggcaagatggatgttgatgatgaagacatcaaaaacaccgcagtcggaaggcgtagagtcgcttgcgactttcgtagggccacataatttgccaggtctgtctagcttgacccctccacctcgcaaccggcgacggagaggcttcaaatcatgtcattaggcataagcttctcggcattggcctgatgacgtttccctgccacgtacgtgatgcagacatgctccatccttttgacgaacgtttccacgtttcgtagtcgccttattaagtgatcgatgaaaccctactttcccctctcgcgtcagctcgcggcccgggcctgtcgcgggcaatcggtgacgcggtaagcgatggatggaatgccaagcctaacttttcccggtcggaaacgcgctcttcacaacaagatccgacgaaaaaacaaacaacgagttcgagcatgccggccaggatcggaccagggctgtgtttcaggtcgcagcattccaggtcgcgtattccaaaggaggagggcgagtccgtccggttccattgccccgaggtgttccaggatctcccctgtcatttctttgtttctgcggtcgttgttgatcgtttcgcaaaaagggagactagcgcgtcgtgcaaggcggttccgtcttggcccgaggacggcgtaacgaggaggggaacggaacatctaaccgcggcgcgttcgctcccctctccccttgccccgtgctcctgcgagagatgatccatcatcatcatcaccgaacttttgagaggaaaaacaaagaggtcaccccaagggaaaacaaggcagcaaaggggggagaggcaagggctgggcagcacagcacagcccaagcttaaaacgcggatccaccctagaattcccggattgtgaaaggcagatcacgtccatcgagatcatataccatcgtccaatatcttactgtcctctctttccttcatatctctcgatcgacttactcgtcacgccgcatagactcgacgaactacatcctactcacacgaatcggcttgacatactatcaaccaacgactaacgatacgcttgatcgaccgacaagcgacctcatcgagctagttgcatctggaacgcgcacggactttttccctttcttcgttcgccacttctcggatccctttcgccacacatatccaaacacacattctttagaactgcctctggcaacgaatcgacatcgcctacttttacgatcatcaactagtcacgatcaattgatatcatgcgatcttcctcaactctgttcacctcgctctcggtcttggcatccgccgccgtcaaccaggtctctgcctttgtcgttcctcagggaagcgaattgcaagatggagctcatgtcgctgcgtaccaaaatgagatgaggaggagggagatcatcggagtagatggactggagagctcgtatggtcagtcatgcctcgacgggtctcggagatgcatctcaacaactgatttcgattcttcaaccatcaatcatcatcattgtccctcctctggctactgtcccttttctaccctcttcgaaacggcttatacaacatatttgcataacacccaaagacttcatcatctgcggaggaggagtcgccggtctcgtcatcgcttctcgtctcagtgaagatcagaacaagaccgtcctcgtcctcgaggccggtgacactggtgatgccgtaaagagcagcatcgacgtccccggaaacgcttagtgagtgcgcttcctgctgctgcgcggatgcgagtcggatgactgatcgttctctctgtacctactcagctactgttagtcgatcgggtctttggagggccggggtgtattccagcacgcgtattgacatgattgcttgttattcttttgtccatcccgcaatcgacgcgttcgactgatagcttcggtgagtactgcacacacctttgtgcgcacctatacgatcggctgagcttctcaccttgctttgaccaatctcagctcttgaacaccgactatgattggcagtgtgagtctactcccatagccattgcctggccccaaactcacctgatttcctttcctcgctacagacaagaccatcccccagacccatctcggtgaccgagtcctcgactggccgcgaggccgtgttctcggtggttcgtccgccgtcaacggtctttacctgtgagattgctcttcgtaaacacgggaattcccctcgctgtattgacacgacgatactgtttataacagcgtccgaccttcgtcccttgaggtcaacacctgggcccagctcgccggtaccaacggttcttcctggaactgggactcgatgttcgccgccatgaagaagtccgaaacgttcactcctcccaccgatgcgatcacccaggacttcaacattgcttacaacggcgacaaccacggtaccgacggccccctccattattcctaccctggatacttgttacctgtcgtaggagagtggaccaccgtcttgaacaacattggtgtcagcgtcagtcccgaccccaacggaggaaacggttggggtgctttcatcgctacttccagtatcaacccttccaactggtgagtctcgagcggccgattcacgattcgactgagctttatcggacggctggggttttgcaccattttgtaggacccgttcatactccaagtcggcctacatcgacccccttcctccccgagccaacttgcacattttgcccaacgctcgtgtgctcaaggtcaacaccaactcgactgacggcatgtacaccgccaccggtatccagtactcgatgaccggaggtgacttgactggacgaaccatcaacgccaacaaggaagtcatcttgaccggaggtgctatcggttcgcctcacatgttgatgatgagcggagtcggacccaaggccaacttggagagcgtcggtgttcgatccgtcgtcgaccttcccggtgtcggtcagcacgtcaccgaccacgtcgcttccgaagtcatcttcaagaccaccgctgccaccgctgctaccgaccgagtcaacaccactttgaccaacggaaccgagagcttcttctcctttgtcaactcggctatcgcttacgccaacatcaccgacttgttcggagactacgctcccgagttcagggacaccatcgctgccaacttgacttgggccgttgagaacgtctgcccctcgaccgatcctaccgttcaggctggataccgtgcggtccaccaggctggtaccgagaactttattctctcgcctatcggacacgtcgagcttctgttgggtctgaccggtaccgctcagggaggtgacgactcgatcgccatccaggccgctctgcagcaccccttctcgaccggtcagatttacttgaactcatccaacccttgggagtaccccgtcatcgaccccaactacttggcccaccccgccgacacctggttgatccgtgaaggtctcaagctcgcgcgaaagattggaaacactgcacccctttccaactttatgacttccgaaatcttccccggtaacgccgtccagacggatgccgagtgggacgcttggctcgccacccaggttaagaccgagtaccacccttcgtcttcgtgctcgatgatgcccctcgaccacggtggtgttgtcggtgccgacctgaaggttcacggattcaccaacttgcgtgtcgccgactcttccgtcttccccgttcaattcgctgcccacttgcagtctttgacctacggagtcggtgagatcgcttcggacatgatcaagaatgtaagtagcgctgtgacagcgccagaaaattgacgaccatcacagctgacatcctccctgtccttaataggagcacatggccgttcgagtcgagatggccagcaacactacctcggccgctggctctaccgctaccgaccagccccagcccacttcgagcgggtctcccgctacgagcagtggcagcggaagcagcagcagtagcagcaacaaccagaacagcgcttcgtcattgagggtctctgcggctggtgtcttgatggcttctgttttggctctggcggctctcgcctaaggattctcttctgatgtctagttgccttctctcttgtgacggacgttgatcgtttctttactacactacacccgatatacgcatacatgcattttccctttcaaactcttcctatgcgcatgataaatcgcgacgtggggctctgagcgttactaagccgaacaatatcgatctgggaacatagcgggcatcactgaatgatacgatcgatgtatcaaaatcacatagctctggaagttacaaagactgatccagtccaggatatgaaacaatcacaagagatactccgtcgtatagctcgtgatcgaaactgtcaactatggtgtccggtagtgatgaaccgtgggttgtacatgtcattcgcgcggtcagccagaggaacgctttacctcagcctcgtcggccgaaatccggttcaaagtgaaaccctgcagtgttttcatcgggctcctcgacgccaagagttctagcctgagtttggacgagaagcatattcgtcctgtacaagtttgagatggacgtaagcgttcagattgatatctcgagcaatcggataagctcaaagcactgacttccgaaggtgttcattttcctctaacaatctgttcacgctcctctgcagatcgcggttgacggctatggtggcgagtgacaacggctgtaggcggttagtactttctccagataatgccttccaactcgactcgccttcgagacctgtgatatggtgtacagctggtacgaagaggttagactcagtacggcgagattagaatactaacctttcggatatctgactgcactcacctcgatcgagtgtgacagtcttagttttttgagtgttaggaggcaagacgtccataagtttcttgaagccgtctcgcatttcgtctcttcttcgttgctcggattctattctttgctgcttcacgctggctcgaatactttggtcgctgcgaattcgcgtcagattgtgaaacataggatctcaagccatttccgactcactccatctcccgtcggggtgaaccctctagaccttcctgatttctgctttccacgccacaagcgtcgatctgcatcgctgccgggactctctgagtcaaactgccaagcggacttctagctcgcatgtaaccagatcccgggccgagattgatcgcttcaccgagactgggtcgcctcgagcctatcaagtacgggtgggatgcgctgacgctttctctccttccagtcgggtctcgagaggtcggcagagcggtagcgctcactgaagacgggctcgttgggtgcctcattttatgctgggagaagtaagatccaccttggtcgctcatggtgatcgaaggggaggcccagttactttcatcggtcgaacgacgggagggcggtccgctgagtcctggcgtcgaggggaatcgaccatgtgagcggtcatttggtgattcggaccctctacctggtggtgtttctctaccgtaacgcgatgtggaataccattcgagaccaaccagtcgcccatgttctatgctcgttcacatcaagacttgtcctggtaatcttgtcgcaacttgcaggtttaaacatacctgagggtagcgacgatgaggatccggttctgacgtggctatgcaggggacgagggttgcgaaggaaatcatctggaggattgtagacattccgaggtatagtttcgaagatgttcgctggattttcacatcgagatcatatcagctccatgaagttcggcatgcgcatactcgtcccagatagtcgagtctcaccaatatcactttcagccaccgaatatccccggggtctcgccccagcgcctggatgttgacggagataatcctgtccataagcagtgaaactgtgcgaggggatcgagatgggtggcaaaatgcctcgcgccgtgtcttccggggcgttcgtggtcgtggtcgtggttgctgatatctctgcgccttcttcctcgcgtgcggaccctatggctgaaacgcaggtcgataggcaaggtgaatcagcaacgacatcccctccaccgaggtagatctcatcgatcgcttacacggtttcatttctgaggactcgtcctgagtccggacggatagaggattttgtatcttttcgatatccatggctgatccggaagaggtagctcgaaatcgtggtcgtgaagtcgtaacggttcgtgatgtcgtcagaggaagctttgtcgtgatatgccatccacgggggttccgagcggcagatcgggggtgtgaagattgaatcgtattgttatgagtcgtaagagagctgaatcccagtgctttcaacccccgttgtgatagcttgaggtgtcaggtgatcgtgctgaacgtatccaaaaagcgatcctcgccgcgatcaacccgactgctagtaaagtcaagcaagacgtcagagatgtcatagaacaagctcaagcggcgaagtatatcaaggcaaatgctcacgatcgttcaaatttgtcctctgtactcctgtcgatgacgacgtgacgtgaccagtttttgttccgtgcaactcgagtctctctacggtctttgttctctttccaggagaagtaagatgctcgacccgtgttttgggaacgatgactgcgtgtcgagagcagcgacatgatgtgcgcaggtgttacggtcgagtgttccatcgcttaagtgcaagtcgacacatcgtacgataggaggcgacaggtcgtcaaaccagctttttcacccgaaaaagacgacggcgacaagaacgaaactggggaggcagtgctcagacgttgctctgacccgaaacaggtggatatgcctgacgggaagacgagatcgaaaggaaggaggagagtgggggaagaggtgggagattagctttcgaggttcgaatcatccaccgacgatcctcaccacgtcgcctcgaatcgagtcaaaggaggataggggtaaggggcgcgtgaggagcgcacccctatccgttgccgacactgccgacgaaagatcacatggtgatgttcaaatttccacgctccccgtgtcatagagttatagatcgtctctttggaattatgacttgcagtttgatcattgcgcttttgtgcattaacccgacttgaatggttttgaagaggacaaaaagaaggctgcccagcgatcgcctcgacgcgcgcggtggcgcccctggttaagcgaggggacaagaggaaagtggatgacggacaaggttcaagctgaggacatcgttctttcggagagataggggacgaagcagacccagagaatcaggggtgataggggctgtccgacctagttcccttcgttgaggaacaagtcaaaccgtctctcttcgttgtttcaaggagggacggcgaaacacctcggacgtccgcttcggtcgctccactgtcgacgcgttgtgtctcgatgatctctgtgccgacagatttatagaactaccgggctgtaggtggatcgaaccctgcaaactccgatgttggcgttcctttccatcagagacaccgggatattcggccgtctcgcctctgcatcgcatcgcgggttgacgtcacagggttatcaaagtgtcagcgcgacgaaccgatcttattcctccagcagtccccgtcatcagtgcccagcactcattgacagaacggggtgtccgattgaacaggaccatcgattaatgcactccttgaatcgtccacatgggaaaacatctagtcgccttccggatattaggcaagcaacagaacgcgaggccgttgggcggacatcgcatcctacgatatgtccgcgcgtgttactgggctgtcttgtcgcttcggaaagttgggcaggcctggagatcgaaagaccgatttcatcatacgatacatctcccttcccgtaaatacgagggttatccgatccacataagataccactttagcactgctatgaatcctattactcagactctgaggcaaactttccgccaggtccagccatcgcggctgatggctggctcaattcggtcgaagtcgacagcagtacctgcccagacgctcgtccttcccgacatccagctcggacctacccatccttcccggtatcaggatcactacaacaacaccctggcagaggatctcctttacatgacgtacgatcatagtctggcgtcttctccctccgcatcggcatcggcatcttcctcgtccaccccacctgtggtcgatccctcaaccgtcaacccttaccagctcaaccgaccacaatcgcctccccgtggaaaccgaccgctcaaacctgctacccgtccggtgggagctacgagcgttcccaagctcgagtccatcgtcctgcacaccatggtgaaagaggccatcgggaacaaacctgccatgctctcggcgatcatggccttgcgagccatctcgggcgagacttatcaaggaggaggtcgtaaagccgcttctggggttcaggtgctcgtctccaaatccggtgccgcagcgttcaagctccgagcgggtatgcccgtcgccgtcaaggtcgagatcaagggcgaggccatgtacgactttgtgcagtctctcgtcgactttgtgctcccgcgtctacgagagtttcccggcgtgcaactccccatgctctcggccaaccggaactctccatcggccacgtcgggtgtggtcgctttcggattggaacccggtgcgatgggtctcttcccccagatcgagaccaacctcgagtcgtaccccaaaatgcacggattccacatgcaattcctcaccaactgcaagggcaagggcgctcaggatcaggcaagggcattgttgagcgggatgaggattcctttcaccaggcgataggtttaggtgcgcatgaagggagtggggagggccggtgggatgttgcggaggctcttgtagcagaagggccggtgctgaagggagaatgtagacgatgcgcatgtatatatcgtcacaagaacataagttgacaccaccatcacagtttcttctttgccgcgcgcccgtctcatggcgtcgtccgtaaagctttgcaaggcttcccttcagaaccttacgactccttggtcttgttctcggaggaaccggtcgacttggactccgtcttgaggagcttctgaagttccgtgatttgcttctgcaactcagtcaattgagcttgaatggctccggagctcgaaatggcggtgctagatgaaaggaccaatataaaacgacgagatcattcggccctgcacgatacggcttactctgggaagtccttgacaagctcagcaaattctagcttgctgatttcaccctcatcgtcgtcgtcgcagtcgggattctgagcgccctcatcatcatcaccttcgttatcggcatgttccgtgcccaagagtaacctcatgcgacggctgtgcttgacgttcatctgtgcttcgaagagcgccagtccagcaagaggcaagctgaacaacacgcccatgatccctcggttcaaacttgcgtaggcttgctttgagagaacccaactggattacaatcacggcaacaattagctctggcgggggggatgcgatctttgtgaaactcactcaagcggggcgatgatcaattccaccagattcaaaggtggcgggtagtagaagaggtcggggcctcgaactgcggggcgaccgttcggtaaggtaggcagacaaattccttcccgagcaagacttactcatgctgatctatgagcacgaagccaagacggatcatcagtcagggaacgcatgtcaatatcgctgaaaggcttacgcattttccggcaaagaacgccatatgatagtctgtagtattgcttgtagcgtcagctgttttgttcctggtgacagctagcactctgctcaccggtagcatcctcttcgattcggctgaaggaatcgttgtataaggcgatcaagatgttcaagagaatgacagttccgaccacgttcctgtgcgtaaaaaagcaacgtattaggtgtgaagctcgttttctccaaacatgaagatgccgcaccatccgctgtttgacggaaattcagatgagcgccagatttgtttcgagaagaatggcggactggacctactagtagataatcaggccaaatgctgtagagcaaagatacaacatcgtgatatgaattccatggcggtgacttctccttctgctggaaaggtgcactcacgataaccgactactctcgcaatttagaaggcatgtcgaacggtcagtagattgccgtacggaacgattgaagtgaacgtacaccgctccgcaggcgtgtcaaagtcaggcgatctactcggcacagatgaattcagacaagtcggtttcggttcggatcaatcatgcacatacccgagcaaggcctgcagtagcgagttgaagatgaaaccgacctcagctgtctctccgtctgctgcatccaatgcatatcttcgaaaagtcggcaagtctcagattgacgtctttcaacgcttccattcgatgtactgacagagcctgcgcgaatccaaccgccatgatggcaagaagcactccgaaaatggcagagtcgcgcaacatgctaaatcgattgaggcgttagctccgaccagatcaatgacaaggcatgacggtctgcttaccggaagacaatgatctgcattgtaccgatgaacctgtacaagcgaaatcagtgctcaaatttccggtcggttctcagtctgggctagaaccaacttaatatagtcgaacaccgtgatcaattctgcatagaaaaagtagccgcgtcagcaaagcgaagggctttcatatatgtctatcccacttactgatccagatcaacggcgcgcacatactcaggacctggaaagatctcaagtgcaggtacgtagttttctcggaatcatgactgaagatcgcggtcaagcgcaaggcaagtgctcccataagcgttgactggatgatcaaatcgactgagacggcgcggttcgtaagtaagtggtgcagctgacatcacgattgtaagcttaccaactacccagaagctgaacgcagcaccagggttagagctaagtcggatgcgtttggccaactgaaggaacaaaacaacgttagaagtcactacaattcgatgtcacgcaatcactgactctgttagcacctataaagatcatcgcgtcagcttgagcaagatgattatcgagcattgcaacgtatcactcaccatcgagcaggaaggaaatagccagaatgtacaagatccactcccattcggacagatgcttctcgtcttggctatcgagaggcgtctggacggcttgagagtagatgaagaggaagaaaagccaggttgcgatggagaacatctgcaagcccacaccgttccgggttaacgatcgatgactaccactatcgaccggcgttctggactaacattctggtaccgaggaacttgcagacgatgaacattgagatggtcaaaccagctagcagagccgtccttgtcgaacggaacgaattcgatgttgtcgttgtcgccgtattcggcgacgagttgacccctccagagcgcgttgacaacgttctcggcctcagaagagctcaagaactggatagcaaactggtcgatagcgacttcgagagccgaagcaggggcggagatgtcgccatcagcctctaggtagcggtatctcgtggacatgacgctggtttgcttttcaaaggacagggtgtggacctgccagagaggtttgcacatcagtatagtttttaaggtctataagggcttaggcattacgaaccagtcgtctggcgatgacttcggctgcggtcgagcgacacatgttctcgtcataatccgcagctgaaacgtagcgaggcccagataagtaactacatttcaaggaaagcatacgcttactaaggcgaaacgtacgagacagcttggcttcatgcaggaattgagccctggcttgcatcaaggcaaagggcaccgcttcgctgaagtcacctcctgcttgagcgaatgcggcaacgacagccggggagacaatcgagctggttgcgtcggtgatgtcgtcctggttgacttcgacagggatcagcttgaggatcatcaagcggacacgtttcaccaatttggtgacagtgttctatcagtttgttcagacggaaagcttagcaagcggcagcatgtcaacttaagtatagcaagcatatagacttacgggctgaggcatgatagagcgagcgctcatcaggctcgcctgttcctcgaacgcgagagcgtctccgcctcgcaattgaggcatgatgtctaagatgttatagccagaagccgtcaagagagtcgagaggacagtgcaataggaagcctataccttgactagaatctgtacagctattaaagtcagtacagtaaacagcagcagatcgtttcgagcacaaacgcgagctgaaaggaatatcgcggggcgtctgccttgcggaagcagatccgccatgacgtcaaggatctgccgatgttttccttcggaaccgagaattaaagtctgaaggactggttgcaaggacaggttgtcattgaagatacgctcgagtgttacacagtcgttgggttataatacatcgtagaggcggtacgtatcgaccgtatttctttgtacatcaggaaggaacgtcgtatataactctgcccgaacggctcgagtttggtcaatggggtctctcacagcacatcatgtcctatagtcgagcgaacgtatccgacacggtcggagccgttcctcttgattgcgtctggatcagatcaagcagggagagtgatagcttcaagccgcgacgctaggtacacggctccttcgttgcaaggtcgacaacatgaattgagccctctcctgcctcttctcgacccgctggttttgcttgatttgagcttcaagcatggccagggggctgacagcgacaccaggcgccgtagcgggggtgcaggtgatggtcggcaacgaagatagggtgtcgaggctcatcgaaccgttggattgcttctctggcttagtctctccgaaggtcggcgtgcaatcttctccgtcctcgagcatgacttgcatgaacccacccgctttggccttggcaccgttggacccaggtttgggctgcaaaatcttctcgaccgaaggaggtgtgacgcgaagcgtagggtaggtacactccggggtctgaggcaatttgcaaagctcgtccatgaagctgacagacttggtgggcgagtagaggatgacgtcgtcggtaacggacgatccagaggagttggttcgaccgtgctgcaagaacgcaggcagtctagacttgcgaggtgtagcggggagcgaggggccggaggtgatcgaagatccgtacccgttgtcgccaaaggattgctctgacccgaaagagtccgaggactccagcgagtacctcttgggtcggatgggacgttcgttctctttgtctgaagagacggacgacggtttgctcttgccagccttgtaacgagcgctgatctcagccagggtaggcatgccgttcttgaaacccttgtccttctcggcgacctgaacaggcgggagcaacatggcttcggcaaaagaaggtcgtttgaaaggcaaaggtgtgatgcacctcggagggggaagaagggcgatggcttcctgctccgtctgtacgtccttttcgggttcaggagcggcaaaggacccgctaggttgaataggagtgttgagtacgaatgtgttgttcgccttggctgagatggccgaggggatgtccgacctcgaacgagagtgggtcaacgtcttgcgaggttgctcgatgcgctcggccgaggtatcgatctttatggcgtcggggcgaaacacgacgccttgactcgcgaacatctgtttgttttgatagctcaagacatccatgccaacctttttggcttcggcctcttcccacggaagcgtaaatttgggcttgaattggaaaacagcggcagcggcggaaagcgcagtaggcttcgaggcagagaactctgcttaagcaaagatgacatcagtacatgaagtgttcgttgggaatctgcccaaagcactcactgttcatccttcgctcgagcatcctgatcctgtgatcgatgtcgatcccgtcatcttcgctgtcaccgtcgagagcactctcggcgacgctgaaagcgacggccctgttcagctcggtcgagggggacaagttgaacgattgtgcgtcttcggaacccttgtcttgaccgatcctgaaggggtccgtctgacgcatgacctcttccctagagataacccggacgatctcctcgacagagcttcgcctgacgtttgttgcctgagctcgcgcaacgacgaagcggggaggactctgcatgccggttcgagaaggcgagacagacgagcggactggcaggccgggaggaggagaagggagggtcgaagatggccgggaggaggagggggagggggcacagtggtggccatggtcctctacgaaacgtcggcaagagggaacgttcagctacacttgcttgctacggacaactgggagtcctacttaccctggcgggcctgacggcggttcggggcacggcggcgatgagagctcgggatcggtacatgtcggtgaaagtgttgtgtaataaggttgaaaggagatctgagtgattgtgagagtgcaaacatttcacgtcccgtggtgactttgcatgggatgtgtgacgggtcgagtggttatatatcctaaagcgacgacggggtcacatgcgagattcgaggttcgaggtttgtcgaaaccggtgacgcgtgagtgacgtaacaacgacgtcataggttcaagaggggggaaacgcggaaactaatctttgcatgcaggcccccgccatcatcactcggtggcagcctgaaacggcaagtctaggtcgacaagacggttacgctcgaagaaatagatgttgaaggatcgctcgacctggtcatgacttcgattgtagaagacagatctagggtgaaatggcgcattggaaatgccgaacgctacctatcaactttcgatatgacctcttctttgcaacgtcaaaagcgttaggttctcccggtgggcaaagggacaaatgctgacggagtcccaagctcctgccgtcaggcaatcagcacatgatgcctcaggaaagtgccgcatatgatatctcgtcgctagcatcaacgaagcagtggagctctccttcaggcggatggtcgaaactgattctctgtcgctaagggagcgttccagatccagcctgccgattattagtcaaatacaagtgagagaattgtctgccataccggagatcacaagcatgcgacagttatgccttgaacttggttaatggacgatacgagggcatattaaacgttctagaaagtccaaagaatatcacgcgatcgggtcgctatacccgcccgtccgactgttgcgcccatccaggtgaacatcagttccgtaagcacgcccgatcgtcatacctacccgtacgcgatgaaaggagcaggagaggtcacgagacacatgtcgtactcggccgagtttctacatccggtccagggcatgtataaatatgctcgtacgcctatgtcagttggtcagcgagaatagtttgtcctgtatacgaaccgtctcaaactcaccgtttccctatttttcattcagattgaactcacagcgctgcgatggccaccaagaaagattcgtctggatcacaagatccagtcaccgggaaaggtgtggcaaccatacgtgcccagctggctcaggcgagctacgatagcaaatttcagacgggttccgaggagaatgaagacaaagagaataaaaaattctgggaccgcctcgctgcaatcaggacaggccgcgaaaaccctccaacggagcctacacctgccgagagcgaggtttccgtgaactcctctgctcaagatggatctcgcgcctctgatcaggtccagtagtcggccgggtcaggcagtctcgagtcttctcaggaaaacaacatctccatgttgtctgtcagaacgaagggcacttcctaagtttctgcagtcctgatgagcggaaaaatcagtcttccgtctgattcagttttacgtcaactgttgtgtgagatttttctgtccatctaatgaaatatcagagccatcagcgcaaagttatcgacgtccccttccgttttttggtcctccgatgaccctgtttagtcatgactagctccgccggagccttgaggggcgaaaatgaggatgaacttgctcgatcgtttgcctctcgttcattctcttgttctccttcatcgtgtttcactcatcacgtgcagctatacttcaagtaatcgactttgagggtaagatcacggggcaagcgaccaggaaattgcatcacgcataaagcgcataaattgatcaaatgttccctatgcaaaggagatgccagtcttgaccacgtgctggtctactatatctaaagcactcccctcctgagacatctgattctcgacagtatgcggcgagacagctgatttggtgtcagggtttaactgtaattaaggaggcacctcaaactaagctgtcgagtattgatgatgggcctcgtgaaatcgcacgtgtgcatgggggttcgattgattcattcgtgtgctggatgttggccacatgactgctcgtctgtttattactaattactactgtatccgtcctgatttggggggcctaatggtttaatcagagacaaaggaaaacaagttgtcaaaagcatgctgtactcatttatattcccacgactgcgatttcgacgataatataaaaggactcctcataggtatacagattcacaggttcctccatgaacttttccattaccgcaatccgctgccttcatcattacgataatcgtaactacgaatacttcgaaccaagatctcaacaagccagaagcgagaaacaccggccggtcagcagtgatgcaaaacactatcgggcaagggcatgaaaaaaagatgatggaagagtgggtaaatccggacccgaagagagcgcaaaagaaaagggaggacctggaagaatggtcgaacgaatggctaggtgaacctccgaagacgacagactcccaacctgaagcaaccggaagcgtgtcatcatgcgcgacagacccttctgttacggggggagcgggggcgtcaacctcgacctcttctgcctgaactggattctctcgagacatgacctcagtgatgtagctgcagtctttgtgcgaaaatgctgtgtcgataaattgaatgatcatgccggtaccgaacgcgcttccaatcatacgatttcttcccttgtgtactgtagcaatttgttggtgcgccgaaaatacgaacgggcccaccgtgcaactactgtacagacgatttcgccaagatcctctcatggatgcgaggcaggtccctcatctgaatctaggaaggaaagatcacattcatgcatatggcgccaggtagcggtgtgtaaaatccctatcgtgtatacatctcaagaccgatcctgaccatgttcgtgctgtagtcgagcgtgtttacttgcccaaagcaaggggctcgttgttcaaccacctgtccaacatgttgaaagcggccaaaggctgatcttgagggacctgcagtttcgaagtgaccaccagttatcagtaacctaatttttttgtcgtgacgggacgctacgagacgagagcttaccatgtgtccggcctcgtaaatggccataaaggcaatgttacccgcaccgtgtccggcggacctgacgtatccggcctcggtcttgttggaagagatgaacggggtggccgtcgagttcaagaaggcggcctggtaagtcgtctcgagcttgtcgacccattgctacgtgcgagtcgacgtcggatcagtcaaggctcaaggtcgcgatgctcggcgtgcgactcacctcgttaccgataaagttgcacatgagatcgttgacaccggcgtagatgaggactcgaattccatcctcgatgacggggatcaagaggtcggaagatcggtgcatcacatcggccttgaagctgtagcgacgggtcgatctcacgtcagctcgcggtccagccgagggttatcgcgtgtgagcagacttacaggaaagatttgttgatatccatgttgcagctcttgaactcgatgttggaaggagcgcccaattctgcgccaacgcaaaagcccatcagctcgagcgaacgatcgtgggtgatcaaaaccggggctcacgcttcttgacctcggggctgttcatgtaggtctcgatccaacccatctgacggtaacacaactggaggtccacagggaagcgataacgatcatcagcaactcgactcgtaccgaccgttaaaatcatacaccggacattgcgaagcgacgatactcacaggcccatcggcgtcttccgacctgtcgcacttcttcctggtgtcgtacatgttcaacccgaggtcctgcaactgtccaaatccggaccaacaggacaaggtggcgggaacacagacaaacttgttgttcacgctgtagccaacgtcggcgtcagcgatggacgtcgaggcagggtcggtgtgagatgacgggcaagaccgggatgactcacttgtaacaagtctcggccaacttttcacacctgctcatcttgctcctcaagctcgtgcattcgggaccatccttgtccttgtacacggcgtattcggaatcacacgcgtattcggggaccgaggcgaactgggtggccggttccgagagtccgttcccaatcatcaccgacttgaagttcaacttgggcaggggagccaccgagttcgagttcgagttcgaggtggagtgtttcttcttgttctccgagtggatgacgtgtgcgatatgcgggagataggtccccgcgtagctttccccagaaatgtgaagctcgttggcccggtacttgccgtacctcgctacgaacaattcgaggaaagcgtgcacgtcctcggcggcggcgggcgaattgtccacggacccggaatcggcgtaagagtagccgacaccgacgggttgatcgaggaagaggacgttggcgtggttcgtccacgaatgagggttgtaggtcgtgttgacgtcggtcccttgaggggacgaggcggtgatcatgcaaggaccgagctcgaataggagaccggtggtgctcgaacatcccgggccaccgttcagcctgtgcgagacacgtcgacgaggtgtcagccagagaccgacggatgcaaggatcgatcgatcgatcggacgaggggggccagtggactcaccacaagagcagaggatcctgagcgggcttgtcccggctctcgaagaaccagaaaaacaagtgcttggtctcgctgacatcgaggtaccccgagatcatcttgaccgagtcgtcgcacaagtgaggcatcttggttccggtgggcgccgtcgtggtcactcggagacggtaagacggatggtccgggtgggagaggacctcgtaatcgaccccgtcctggaccaacttggagactcgcatcccgtcgagggtgtcatgagggttcttgtcggtagtggcgcctccgatccaaccgccgacgctgttcaagaccttgttggcgacattagggatggagagggacgagtcctggaggttgaagagggacgaggccgtaggcagggcgagggagagggtcgagctggccaagagggccgtggtggtggctatcgagtagcgcatcgtgaggattcgagttatgttctgatggtggaaatgatatctggttttgagtgattggtgtgtctgatgatgtatgatacaggatggtggtccccctctctctatctactgtatctaaacgattcctcatcgcctcctccatccccaagtgaggtcgtgtgtgaccgtttcggccaacaccgagtcgctcgcctcccccccgatccggtaattcgccgaaagtggatcacccaatctcggcatttcccccgttcggtttcattctcggcattccacgcttacgtcaccaacgaagcgcataatctgcgcttctgattgacattcccctttgtgttccttcccgccgcgtcgcccttcccaagcctcgaccccccctgccgggactcgcaaacccatataaacaactcccaacacactttcatcccccctacactcagcccgcacgcccccccttctttttctcttcataaaaactgaaacactctcctattctgccgaccttgtagccccccacaaagggcactgacatggtcgtcctggtgaaggagacagaaaaagccaggcccgctttttctccccgttctcacttactatgggaacggcggggggcgggtgagcgtcatggattacgtcccgcgaggtctgggtatccccaagaccatcgttccgagaggatcgtagacgccgatatttgaagagaaggaggtcgaggtgggacgaattcgtgagtattggttcttggcaggtagagagagactccggaaggatgagggagagagtggacatcctttcgtaaaacgcttcgtacgatcgagcacaacattttcataattatcataaccattgaatcaacgaccccgccgtgtcttcatctcgtttgtgtcgtaaaaattcgtcaaaccaaaccaaacccccaaaacagctctcccccttcgtccgttctacgacctctcttcctattcctccattcatcctaccttcatcgaccccgcctctgaaccaccccgtcggcacactcctctccccatcatctcatcgccttgtcaggacctccccgaccccgcgggcttcatcacgcaggaccttggctctcaggtaactcgaccccgaggcccgttcgatctgcgtcgccagggccgccaacgtcggcgtcggcgtcggcggggtcgacatcgacatcgtcgtcgggtgagggttcggattggtgtggagagcggtcgtgttcgtgttggtatccacgagcatatccagatcgttgcgttcgtcggtcccgatcgtcccctttgtcggtggtgttttcgtcatcatccctgctcctgctatcgctcctgcttctgatcccgatcctgctcctgatccgggtcctgatctagacgccggtggatcgagcattgggaccccccctaaggacgtcgttaacgatgtctcgatcaacgaacggagcgtcttgatggctacagtatttcgacggtggacccgagcggggagtaagaagatttagttgatcgtggtaggggacggagggtgatggacgaggtggggatggagtcgattcgactcgccttgttcgtatttgactgggatcacctcgccgggaaagcgaaagcactgcggtcagcggtcaaagtcgtgttgcagcatatcaataaagaaggacgactcacgtcgagtttcgttcggattgatcgtcgggtcgaatgctttctccctgatccgggttgatagatcgaggtatgcgcaggcgggatgacggtcaataatcgatcatccgaccaccaggcggcctgccagggtatcgccagatccagatctcactcgatcccattatcgacactcacacgccatcaaacaccccatcgagtaaaccttccaattcgatcaacccgctcaacatgtctttcaacccggcatcgatctgtccaggctcgggttgaccgtgcggaggtggacgtgaagtcccgctcgtcacgctgccgacgatccctgtcgatttgagctggcggcgcgggaccgggatggtggaccgggggatcgagggagggtaggcggatgacatcgagtaagatagggggtcttctaggtgttttgttgtgctattggcggtgtggctatgatgatcttgtcgtgcataggagtgtcgttacatctcgtatagatagattcttcttgagagtgtgtagggtttgtttaggatgtgaggtggtggtggctagtgacgcgagcgaacggacatcgtggacaacatggagataagaaatacatggatgtccgtgatgacacacactctcgcctcatccccctagggatgctgcatgcaatgctatacagtgacccctacatcgtacaacctagacatcaaaccgtacccatcgacttcgcccctttccgcctctcagacttgtagctgcgttcatcgtagtctcaacctctaccccataccccaatatagcaccgacatcccgagccgatcatcactcgccacgatggacaaggaactcgaagagctcgagctcttgtcgctcgtcaacaaggtctcgcaagagatcttcaactttacgggtagtgccgatcaagacttggccaagtttgtcatcgccgtaagtcccaacccacttctcgccgacgagcgattatcagagctaacccccgcctccgtcgaccgcgtgcagcttcatcggaagagcaagaaattcgacgtcttccagaccaagatgaaagagatgggagctccgttccccgattcattcgttcagaatctcgatcggatcatcctcagcatgcatcccaagtacaagaaaaaggctaaaaaggcgcaagagatgaccgtcggtgggggggagatcaagggcaaggacaaggatatcgaccgtgtcgtcgatgaagagacggataggcgggcgaggttgttccccgggctcgccgtaccggatagtcagctgaagagtcacgatcagtttttgaaggatgagaggaacgccgggcccgtcttgcccgacgtggacgacctgatgaaggaactcgagggcgtcgggtccaagcgcagaacagaagacgcggggatggaggataacgggtacaagcgtcaacgggtggaagatgatgggtacgctcaacgcgggcgtggtcgaagtccgccctcgcagacgggtcgatcagacggacgggatagcgggtatgggacccggttgggcgcaggtccaggtgggaagaacggatacgacggtcgaggcaggcaagatgacaagcccgtcctatacaagatttacaacggtcgggtctcgaacattaaggatttcggttgtttcgtcaccctcgaaggtatctcggggagacaagagggcatggttcacatctcgagcatggcgagcagtagggtcaacagcccggccgacctcgtcacgcggaatcaacccgtcaaggtcaaggtgatgagtatcgcagggagcaaggtctcgttgtcgatgaaggacgtcgatcagagcacaggagcagacttgtcgtacgtgcacctgcgcctcgtcctttactcactcttggctcgtatcgaggcgagtacactgatcccgaatccccactcttacgcgtataacagaccacacttgtacgtcaagacggaacaagagatcgaagaggaggaacgccgccgcgcagcgaggccccctcccgtgacgggcgccaacagcgcgaccatctacgtcgacgagaggaaagggtccgccaagcgatgtgagtagatcgccgggggggtcaggcgctcctttgtcgacaaggtttttaacgctcggtatcgatttcgctcagtatcatcaccggaacgatgggagattaaacagttgatctcgtctggggtcgtcagcgcggccgatgtgagttcagccgacgtgataggggtcaactgcgcgcggagatctgatttatcttactggacagtaccccgacctcgacgaggatatcaactcgacgaccgtggcggcagaggtggaggaggagctggatatcgaagtgaacgagaacgaaccgtacgtcgaaccatcacgtccccgcgttggtgtcacgaccgctcatccgcacgtgtcgtccattgcagtgcctttttgagtggccagaccaaggtcacgctcaacttgtcccctgtcaaggtcatcaaggctccagacggatcgatgaatcgagctgcattggccggaggcgcgttggccaaggagcgacgggaacttcgacaacaagaggccaacgacgaggccgattccgaggcgagggatttcagtcaaccctggttggaccctatggctcaagcggcggacaaggtgtttgcttccgatttgaggggcaacctgatgggacaaaaggcgctcgaacagcccacatggaaggcggcgaacaaggcggtgacctacggaaagataacgagtctgagtatccaggatcagaggaagagtctgcccatctacaagttgagggagcagctcatgcaggccatccgggatgtaagtctggccttgtcatacgtctcgccaggcccgagtaccccgactgacgtacaactcgtatgcagaaccaaatccttatcgtcgtcggagataccggatcgggaaagacgacgcagatgacgcaatacttggcagaagagggtttcgccgaccgaggaaagattggttgtacacagcctcgacgtgtcgccgccgtctcagtcgccaaggtgggtcgagtcccgttgccctgtctttgagaccgagactgataccaaaaacatttgtgagaatagcgtgtagcggaagaagttggttgtcgagtcggtaccgaggtcgggtacacgatccgtttcgaggactgcaccagtcccgagaccaagatcaagtacatggtgagtccgaacctgatcgcctacaagtatgtcccgtcgccgaacttgacgctggctacctttacccagaccgatggaatgttgcagcgtgaatgtctggtggacccggacatgtcgcaatactcggtcatcatgttggacgaggcgcacgagcgtaccatcgcgacggatgtactatttggtctgctgaagagtgagtactagtttgtgtgtgcgtctgcagtatacatcacggttgacacatcgtatttggcagagtcggtcaagcgacgacccgatctcaaaatcatcatcacttcggccaccctcgacgctgaaaaattcgccaggtatttctacggttgtcccatcttcaccatccccggtcgtacattccccgtcgaagtcctctataccaaggaaccggagaacgactacctcgacgcttctttgattaccgtcatgcagatccatctttcggaacccccaggcgatattctgctattcttgacaggccaagaagagatcgacacggcatgcgaagtattatacgaacgaatgaaagctctcggtccgcaggtgcccgaattgatgatcttgcccatctactcggcgctgccttcggaaatgcagtctcgaattttcgatccgacaccaccaggaacgcgtaaatgtgtcattgccaccaacattgccgagactagtgttacgatcgacggaatctactacgtcatcgaccccggtttctcgaaacagaacgcgtacgaccctaagctcggtatggatcagctggtcgtcgtggtaagtttgattcgacaggttggcttcaggtccattgctgacaccccaatcatggccgcctttagccaatctcgcaagctcaagccaagcaacgagccggtcgtgccggacgtacgggaccgggcaagacctaccgtctttacaccgaagtcgctttccgaaacgaaatgctaccgagtcctattcccgaaattcagcgtcaaaacttgtcatcgacgattttgacgctcaaagcgatgggcatcaacgatctcatccactttgactttatggacccgcctcctgcaccgacccttctgacggcgctcgaacatctctacgctctttccgcgctcgacgaggaaggactgctgacccgtcttggaaggaagatggccgatttccccttggacccggctctttcaaagacgttgatcgtctcggtcgactatggttgttcagaagaagctttgagcattgttgccatgttgcaagctgaaggacaagtcttctaccgaccaaaagacaagcaggcccaggcagacgcgaagaaggtgagctcaagtgtactaacgtcgcgcgttggaaagaaactaaaacttccctcatcaacaggccaagttccatcagccagaaggtgatttgctcaccttgctcgccgtctataatggttggaaggggtccaagtttagcaacccttggtgttacgaggtaagtcggtcaaaaggccgggaccagaatgactgagcctgatgctgattgtccctgtccagaactacatccaagcgcggtcgatgcgaagagcgcaggatgtgcgaaagcagttgctcggtatcatggatcgatacaaacacgacatcttgtcatgtaagcagggtttgtcgcacgacgttccagagagagtgctgacttttggacatgagaaacaggtgggacgaattacaacaggatccgtatggcaatcacatcagtaagctggccgcgtgccaattctgttcgcgctttgcttatactgttattccgtcaataggggttcttccgaaatgcagccaagaaagatccgaatgaaggatacaagactctcgtcgagggtaccccagtatacatgcaccccagctcgtcactcttccaacgtcctcctgagtgtgagtggcagctgcatctcgccatcaataaaccgctttattaactttgaactcgctacacgacttcgtctgctgcttgtagggtggtgcgtactcgagacaaggccgatcgaactatcagcgcattgaatgctaatacgttgtcttgctacagcatttactactcgctcattctaacaacaaaggagtacatgcacaacattaccgcaattgaacccaaggtgagtcccggttcatcgactcgatacgaagcgagcgatctatactgattctcatctcattcacagtggttgactcaagtggcaccgagtctgttcaaggtcgcagaccaatcgaggatttccaagatgaagagggaggagcggattcaacctttgttcaacaaatacgtgagtacgacttcgccgccggcgcgcctagcttgggctgacgttttcatattgatgccccgtcgcaaccacaggaaaaacccgacgaatggcgtatctccaagcagaagaaggcgaccaggagttcgcaaaccttcggttgagagacgagggctctcttccctgttgtaccgaatactatttgcatcacgacgaatcgatgtatcgcatcgggtatatcttgacgactttcggtgctgtaaacccctgttcaagcgcaaacctgagtaggacccaaccgatcagccgcgacgttccaccgcctgaaacttctccttgtccctcataaaggaggcctatcgagcgtttcacaattttcaagctttaaaaacattgggagtcaaattgtcttttggtcgatggcctgtctttcatagtatcgcattcaactcaccattcgccaccctcttcctcgcgatgcaacaaaccactcccacgcaccccgggccagcacaaggagcaccgcctcttccagtccatccctccaatccatttgccgcaccaccgcctgcctaccctcaatccagcacgaaatcggaatttgactcggatggtatcgagttcctgcgacctgttactgacaaggatgacccgaagccaacagaatggctgcaggagaggtccgcttatcccatcgacaataaggcgcctactgccgttcctcctcaaaccactcctgtcgaccgatacaggcctccctcgagtgcaagggttagttacgttctacccgggcccccgccactacggcctacaccggctccctcgcggcggatgtgggcgccacctcaacatggtcattatgacacagagcagggacaacggcagtaccaggaacctgaaatcgcgcctagacgtttcggacctgcgttcatgtacggtcgagacggagggcaacgcccagatggacgcctgagcaagggcttgaagatattcagtgagtcagtcgattgcgtgtcgaacgtctgagatcctgaagctcatctaaccatctcggcagtccatatctgcttggttttcgtcgtcatcacgctggcattcggagctggcttccagtccggtagacaagtgggatgcggtcggtcttatcaagccgaccgcgataacaccacaatgagcgaagtgtcccagctcgagacgcatgacgttgacttgagcgatttggatgatgatacggtcattggtgctaacaggatgttgactggttagagcatcttatgctgtttagcagctcgatatgtctaaaagaatcaataccgctccgtacgacctgactggaaagattttgacctgactagtgacgcacagaacttcgagccttccgctcgaggccgagtcgtcacgactgcatcttgacggaacgagggcatcttacgaaacatgagcgccgactaggaaacggcgtttcctaatagtcacgctgaacacgctgaatatacgtatacgtacgctatcactcagtgcgacggaatcggacggtaaatagaaagtgtattcagaggacagcaatgtccgcgcttagggtctgaataacaacctcttctcatcatcccaccccatcctctctacccatccgcgctggaaccctcgatctcgtccctgagctccatcgatagaaactccgcagttttcctcttccccccggccatgactgtatgggtaatcgttttcttcgtttagcccggccggatcatcgaaagggaataacagatcccgccttcgcagggaatccaattttcgcccccttgtgacgagttcagtgacgaggacgatgatcgtccagaggaggaccaggaaagccaagcaggacagtccgactgtgttcgggcgggggaatcaagtgtattcggatcagccggattttcaacggtaccgagccaactctaccgagctccttcgaagtaaatgagggtttagggagggacttactgaacaggtaaaggctaaagtcggaggaacagatcgtggatgacgtgttcgacctcgctgtgagtaaggggctggcggatgatgatgataatgtggacatttgcgtatgtcgcagaaatgtctaatgtggtgatactgataggcgcctcacggaagggggtgacgaagggccaacaggtcgaggatttcaagacaggatgatgataggggtggccggactgtgttccgttcttgtccgtaaacagtagaaacttcagagaagccagatgagagtactcgtattcgcacggctgatatcgttcctccctagacccgctggctcgaagatacgaaacgcgagaacaggtttcgagggatacgctaggtttcaacctttgatcatgcgtgtgacggcgagggttaacaaaggatggcgaaatgcttcatgtatatgggcggcaaggtgtagacgcgactgagtgggattggaggctgatcaagatccggagcagaagctatgcgaacgaatggtacctgtctaggagtgtgtgaagcagatgatcggtctcgtatatgaacgacgagaaatctgacggcggggctatcatccgggtagatgaaccctccccaacggcatgtccttgggtatatccaggagatatctacaatccgtgcatgaccatgaccaccacgattccggtctctaggcggcaagctgaaacgtcctgctgatcaaagaaatgctacccggttcaaacaaaacatgttcgcctcgtttctagcgcgcaatttcccttgtcacccgctgtgagggcggtttgagaagaggacgggcgcctcggcggggctaagtcgtctgattcggttggtcgtatcggttcagaccccagaccgactcgggagctatgtgcgcatcacgggctagcgggatgcttcacatgatcgacatctctcaaagacccagcaaagcgtttgggaggtgccaactagaatacacatgcaaacaggagtgaaagtcgcaggtcggtgtacgagtacgtgccacgcgaccggttggtctgcttgcccgatctggtcagatgcgcgcgtcgccctttgtccgcgggcgagcgccggtacccccggcggaggaaggtctacgtcgtcgtcgtcttcgagcgtcaatacctggaagacgctgagatgggttctgttcacactctgtagcgctgacagtagcgatatgcacaggtaacggtatgtgaccacgagggtgttgcatcgggcaggacgttggtgcgtttacgacattttcagccggggatcgggaccggcttttctgtgtgtttgggttggggaatcgagtggcggccgtcggggaagattattttttgttttgtcatcgcgcgcgcgagtaactggaaaggaaaaggcatcaacgagcgggcgagcgggggtaggggatgtcatgcccgtacagatatcatcgattgtcgtcgaccgtagttcgggatatcatcagctgttcgtctgggtctacgtgacaagagttcagagtgtctgtgtcagtgtgtgcgcttcctttgattcagactatggaagtggcctatgtagagtgatcagtagtgtggcgatcagtgactacctttgcccgttgagttctcgcggaaacaataacaaatcgcccccgaccccgccatcaactcgacatccagacatcgacatctgtcatcaacacctacctaacaacgatcacattcacattatttgaatcaccgacatcacccaccatcacaaaatccacatcactctagtctgggacacatactagtacatcctactctgactactttcacatcaacctctgctctcgtcgtgtctctctcgcctcgagtcgagtctggtctgagccgcggaaaaaaggcaacacgccaaacggtctgactggtattttcgacacacacgacgtagtctagaatcgatcgtcgaggtcgagatacaagatcgaacgcacacggttctcgtattcccggatcttaacgcttgttcattccgacgagtcgatctgagattgaggaaagccgagtctctagtcgtcgacacttcctgattgcaatctggatcgaagtctgagatcaacccctcttcgaggatcgcgaccgacttgaaccaggacgggacaagctttcttcgcatattactacgaaccaccacttgtagactttcacgacacacgctcctttcaatcgataccgacccgggtcatgccttcgagcatctttactcgctcccgtcaacattccaaccataataccggatctcacccggacgctcaaccccccgttcaacccagtcgacaaccttcgagccccggttctacccatccagtcaggtctagcagcccgaccgtctcgatctctcatacgcatcatcatcatccgggtccgttgagaccggagatgaccccgcccaacccgcctcaccgacacacgacccggtccagcggacagactagcgccaaggagagcctgatgagcgtcctcggtcccaacaaacagggcaagatgaacgcgtttgaagatgataatatcatggacgtacctgatctcgtcggaggatcccatggacacggacgggggaacaaaccgggtctgacctcgaacgcttcgttcatcaccacctcgacggcgagcacgaccaaggtcgtcaccccgccctcggacgatacgcctttaccctacccttacctctcgagcaaacaagccacccaggggttctccccgccccagtacaagtatagcgctcatcagaacggaggcggaccggatatcctagagagacaggccacattgttgcattccaagtttgacggtcttcagaacgggacttccaccccgcagacgatgagcggctcgggcgggcaacagtaccactacaacacccactcgcagatcagctcggtcttgccggacgacctgagccctatcttggagaaacccctgatgctcggacatggacccaaggggggatacgggtttccgaacacggcagggtcggccaacgggggaccctgggggacgaacaagagcgggaataggcattcggagtttggctgggacccgaatcagaactggaggtacacgagtcaggtgagttcttggtcggagcagcagtagcagcggcggcggcgtcgtcgtcgtcgtgcggctcggattcgtctcgtcgtcaggaaaggagctgacgagccgtcaactgtcgttccacatggcagtacgacccgaattgcaaagaacccaaggaagtggaaccgacctacttttggctgttgacgacgtacttcaggtcagtccctttcacgcgtctcgacagtggccaccgatcccgccgagctgatcgccccgcgtgaaatttatagctacctcgtattgatctcgctcggccacctgagggacttctggggaaagaggttcaacaagaaagagtttttgcacttgatgcctcaggacgtgagtccaagatgaatgaactcgcaagcactcgcacgactgacacgcttctcgccggacattttctcagggatacgccgcgttgatgtcagactttgactcgttctacacccgtcgactcaagctccgattggacgactgtttctctcgacccacggctggtgtcgctggacgaaccgttaccctgctcgaccgaaagagtgacgaccagcacaagtcgttccagctcaccgggaccaaaacccgggcgttgaacatttcgtcttacaactacctcggattcgctcaagccacgggtggatgtgccgatgccgtcgaggccgggatccgaaagtacggaatcagcgccggtggtgctcgtctcgaggcgggtacgctcgacttgcacatccaggcggaaaagctcgtcagtcaattcattggatccgaggacgccatgatcgtctctatgggtttcgctaccaactcgaccaccatccccgccctcgtcgatcgaggctgtctggtcatctctgacgaattcaaccactcgtccatccggttcggtgtcaggctgtctggagccagcgtgaggacgttcaagcacaacgacatgaaggcgctcgataccttgttgagggagagcatcagccagggccagccgaggacgcacaggccctggaaaaagatcttggtcatcgttgagggattgtactcgatggaggggacattgttgcacttgcccgagttgatcgtcatgaaggagaggtacaaggtatgtgccatcacgtctctgccgtgtagggtgatcgtcgagctgatacgacgcggtgcgctcttcagttctacctgtacgtcgacgaggctcactcgatcggagctctcggacccaatggacgtggtgtctgtgattactttggcgtcgacccgaggtgtatcgacatccttatgggcacttttaccaaatcgtttggagcttcaggtatgtgccggccgctcggcgccgctacgcgactcgccattgaccgctcgtctcgactcttcaggcggttacatcgccggtaacaaggaagtgatcgatcgaatccgcgtcaagtcccactcgatggcctatgccgaagccatcacgccgcccgtcttgacccagatcatttcttccatggcttcaatcatgggtgtctcccccccgctcaccgccgcgtccagctcgcccgttcacaagccttccctcacattgcacccgtcttcctcggacaccgatcttccggccctgcagatggcccacgaacccggtcccgcggtctacggcccggcgccctcgcagtacttgccttcgtggatgcacctcccgcccgccttgctgaacggtaccgaggggcgtgaacgacttcgacgtctggcgttcaactcgaggtacctcagttcgggtctccgcaagctcggtttcgtcgtcagcggacatcgagactcgccaatcgtgccgctcttcttgttccatcctggcaagatgcccgtcttttcccgaatgatgctggagcgggtcggcaaggatcgaaccccggtcgtcgtcgtcgttgtggcctacccgtgagtttgcgcggtctccattcgcgtcgagcgtgccccgactgacccgttacgtgccgcccatttcgacagtgctacccccttgatctcgtctcgagttcgattctgtctttcggccgcgcacaccaagcacgacattgatctcattctccgagcttgcgacgagattggtgacattctcgacctcaagactggcaagaacaggtggtcggccgatgaagtcatccgccgcgccgaagagctcgtgcacgagaattaggtgcacaacacccagccggactcgaacatgacgctcgactagactggttcacgatcacacctattcaccttcattcattcacatatgcactcgctcgagcgcaacttgttgtctattttcttcttgtttttttttactcggaagagtagtgtaccaccggtcgggagactcctctcgacgccgatcttgtatcatagacacatgttcgatgatattcgggcgcaataattatcacaaccgcgctgagctatcgtatttccgacgcctctggtcttcgctaggattgttatagtgaaccggtgaacggcaaggagggccgcgcgaattcgaacccatcgtgtcgctactcagcccgagaaccagatagatctcttgaccttctccactcgagctgtctatgagcagaataggactatgcctcgcaaccgcgacggcgacgaatcgcttggtttcgaactgcatgacgagaaaggggaacgagtgtttgtaatggctaaattcaactcaccttctccgagcaaaggcacataggctgggcggcggacgtgtacaagttcgttcatggtgggagagacaaccgtttgtcctccgacctaacgaacacggacgtgagacatcctcaagaccaagctgctgtcatagctgacagccagcaaaaactccctctaaagagcaaagaagggagtagcaatggtcaggaggatggggaggaataacatcttggtttatggatatgaataggtgcaggtcgatgtggacagaggtcggcgacgacgtctaggtcggtctcaactcgtcttcttcctgccgatccacaactcggtcccacccatcccgcttctaacctcttcgccttcgtcctcgtctctccccgtcactacgtcgacaccgagatcgtcctcgtggcccatgatagtaccgaactttgttagtccgatcccgatttcgtccagcgcaggccaaagggtacgctcagcggcatgacgctgcttgtaagcgagcaagaggagcggcgtcgacgttgatgatgtgatcggggtgaagaggcgagagagcgtagagatgagagcgggaaacgaatcggtattgtacgtgacgtccgccgcgctttagtcgatatgctcgtatcagtcaggcagtggaccgaatcgcaagtccgacggcactcacactatcacatccagtgggctcttggcgtccttcgctccgtcccactcccagacccagtcgggtatttcatcgtcccaatccagaacgccagaccgaacctggacccctccatcctgctgctcggccttcgttggatgccatagcgatcggttcaactcgatgttttcgtcgatcaacgggatagccgaggctacgttacgttcgagggtggtcaagagaaaaaagtcagcccgatagttgtgaaaaggcttgtgcttcatgctcgggaacgtacgtagatcggtaatcattactctcgcaccgctcgacaggccgctagctgccaacccgattcccaccaatccggtccctgccccgatctcgagtattcgcgctcgagggcactgtagcctctcgaggaggtcgagtggtgtcgggagagggcaagaggaggggagttgcgtgaggtatgatgtgagtgccaggccagagtcccagattttctgctcgggaaaagtcaagaagtcagatcgagattgaaggtggatgggtgtggaagggcgactgaccttgtcgagatcaaagcttgtctcctcgacaatactcaagatcctctcttgctgtacttccactgcatgatcttcctcctggacatccacttcggacgaaacagagtccacctcgtcgcgtttcgggactttgagcagcccctccgaatcccgcttcaacgcccgactgggtccagcttcagcctccctctctggtcgtaggaaatccgaccccggtttctcagcatgttcttcattcagacttgtccggctcaattgaggcagagaccacgctcggacgatcctcgtctgtttaggtccttcccccctgggcgatttcgacgacggatcagcgttaccggtcgaagatgaagtcttgaagtgtttcgacgacgaggtctttttcgagctgggttttgatttcccttggacagaaacagtagaggaagatgatgaaaaggaggaggatgaggtgatccggatgccttgactccaaacgtccacaattcggcctttctctagaggaatcccggcgcgccagctcgtcccacttccgacgaggtcgatcatctcctctcccccattcccgctcgaccgaccgtcctcgtccacattggctgataacccgaggtaccatacttcacctgctttacacccgcggggaagcggtacgtggttcggtttgtaagtcgacgtgggggggaggtaggtggtgaggaagcctgaacaccgacgaggaggagcggtgttgggaagggagaggtgtgtggcgggatgggaagaccaggtatagtagacccgggtaggacggtcatctagcagtctgtgaacgacactatacccgacttagcaaggtgcgttgcatgtcggggatgttggacatctcccgcggtttcaacgactcactcggtccgaaggtcgttggctatttgcggggtgatcgtcacgcccggggcactgctcgacgccaggtcgatcgatgtcggaggtgggcgtaggaaagagagataatagtacattctgtcaccattgatggtgtgttgagtaagggtgaaatgcttgagtacatgagtatatgagaataccacagacacgcatacttttgtctcgaaatttcgtgctcaaagcccgaggtggtcttctatcgcgagcgtgaacatgtggaatatcgttcaacaggcaaacagaccaacagggtgaaactggaacattcatcgacagatcgacagcaacatacacagtagtagtatcgtcatcaactcggtaggcgactgaaagcaagaccaacgcaacgacagcgactcaaatcttgaagcctggtcttggtctaggattactcctcgaaggaatgggaccatcgagagtatactatagacgggtagaaaccgagtcgattggcacgttcatacttgagagtcaaagagctaaactcgcataacagattccaagagcgacgcagcctggtgatccccatataggtgacccttcttctaacagtacgaagcctcgatagcgcctccgggaaggacgattccaccggcctcgacgagagccctccagttccagtagtctgccttggtaccttctccatcaatcttggtagtggtgtctgtacgatggaaagggcaaatcaatatcggagtactatcaagatactctcgtacgctaaactcaccgacgacgctcttgtaaccccagaaggcacctcccgacagatattgggagtaggcgtattgctggctttgataaagcgcagcccgtccctcgagagtattattgtagatagcttcaagcgaccattcaccaacgaaaacagggaaatccgtctgcgcactggcagcttggccacaagtgatctcgggaatgatgttgccatacacgccagcagcggcgactgtatcgtgtggaaaagagttggtatcgggagcacgtcacgtcttcgagccttcacatacgactcacaaaaataaaagtgcgaatcgaagacgatgttatcgcccttgttccagaaaggagcccagtaggatgcgcccatgaaactgtcttgaatcatcaagggcacaaagcttgcgcgcttctgcagcatagcatacacggtcttttggaatgagttgtagtaattgactccatttgggttcgagatcgtgttgggcgttccaaagaatcgcagtccagtgtcaccagcctcgttacccgcaccgagagtgaattgacggggattggcagagttgagaataaaagagatcatatgatcgacgacgtcgagagtctcctcgaaatgggtggcattgtaccaccatccggcatgtccaagagcttcgccgatatcgagagcattggctgtgggcgaaatcatattccagtcagttcgctcttcagacactcacgatcatcctgcgcgtccaaactcaccaccacccgggaaagaatgcagacccagcacgacatgcattcctcgagagacagcgtagtcggtaacctccttcaagtacttctgttggtttccgtggtacagctgggatccgggaacctcagcccaggcggcgtacgctgagatgttgcattgatacagtcaggtttgaactcccggaagctctgcctccgcctgatacttactggtgggaatacgaagggtgttaattccgtaggtcttcatgtagtcgatgtccgcggttgtgatgaagctggagtatctagcttcgagagcagcgccacatttggctttgccgatggtctcacaacaagtccattcgtctacagcaccagggcatccaagtgtactgtatacgttgggatcgttcccagactcgacctccatccagccaccgagattcactccgttggctttgtaagtactccaacctgagaactgcaaaaagaaagcgtggaaattagattggagcctgatgccctgctaaacttttgaacttgccgagttgaactggttggcatgctggtttcggtgggcggctccctgtccctttccattgccaactcctccgttcccatttccgttcccattgccattgccattgccatttcctttcgcgttgccattgccgttgccgttgccgttgcccttaccattattattgctgttgctgttgctgttctgggctttgctgaaatcaaacccccaattcggcccgtgcttgccggcgtcggtgctgggcgaaagaccaacttttttcatgacctggccgagagctagagcgaggccattactattggtaggcgcagcttcgacactcagaacggccacggatgccagggtagttgccaggatggaggtggtcgtgtaatgcatggcgagtaattggtgcggcggaaagtgacttgggagccaagggatactcttcttgatttgttcgaagagagcaagggctggcttcagtatttatgctgattctgtgaccatgattttagggacaaatgcgatgtttttcttcgctggttgctttcaatcaaaacaacgctgcctgacactatgcattggtggaggcacgatcggcgactatatcggtgctgtttgttttgacggagccttccattgagcacccgggattctcgggtggctggtagtcccatcagatcatttgttcgcacattgggaaagaaggcgaacggctgtcttcttagcgacaaggtaacgacgtgcgatatagacaggttgcactccgaaacgttgttaaccccgcgcctgcgcctctcgctcgcgtggacccaatgtcgcagacccgagcggagccttttccatataatagcacatttgtgtcgaagagacacgcccggtcggttgacgtattgtcctgtctatctcccatggccaacatcgaccgccgggaaatgacgcactcgcgacaaaccttttgttgtaatgctcgagcagcacatcgctcccgacgatgccaaagttcgcgggaattaatatccggcacgcgtcccgtcgggtacccgccattattgcccacgagaaggcgctgcaagcgatcacggtccttcgagcaagctaacgatcaccactgtagagccaggatgccgagtgactgaggtgtttgctcaggtgatgaggggcaatatgttacggccgactgagtccatgcgggacgccagtcgtgcgtgaccgatcggggaatgaaacagatatgcataggacaccgattcgtctcggattcagcgtatcgcgtcactagcaagcggacgaggtatagaaccgctcgcgacggagagaatgatcggggacaatcatccccgcttattgggcgtcattacgcaggagctgtattcgttcccggtctctatctcgtattgaggctctcctacaggattgtgtgtagagccaaaggcatctcgccccgcctctcaggtctcgccgtcttcaaggctacggcgggagtcgattgggaccccagacatcgttttgaacgaggatctcggaaccgcctcggacgtccagtatgatagctcaccgaaataagctgcccttgtccagacgtttctgcacgagcatcgacggcactactggttagatcacgacatgattccatctggacttgactactcgcttacgtaattcacatttccttccccccgcgattacgagattcgaaatgaccgagctcgactttcggtcgtaccacctttatcgaaccaccttctcaatcaaaggtcaagctcaagtcatgcaagtccttggaaacgatatcaaactaacaactgccaaagccagctcagcaacgagtcatagacctagcttgagagtgtaccagactttacctgtcaaacgagcccggtccgagttcgatcggacgtggaaagcggatcgtaccagttctcgtatagatcgtcgttccacccaagaacgaattgccgcacactctggagaggagcgaggagagagagaggcgataaagcgaatcggacgacaacatcataataatcgccagtaccagctttaccagtacttggtcgactcgaaacgctgttcacgcaatcaggcgatatcatcacaacgccccgctgttcaagagtcgacggaaacaagtcgatcgcatagagcatatttcatttcggattgtctatcgactcagccatacggggcacgactgaaccccgagtggcactttacaccatgtccaattcaaccctccgacttccctctcacccccacccccatcacaatcctcacagtgaccaacatggacagcaacagcaggacgacgaggacgatttcctattcacccatatcccaccagattccctcgatttcgtagacatcctgaacctcgctgaacctgaagcgtcggctcaatcgcaaccgggacctgcttcgttgcccatccctctcgaggcccataaccagtaccttgacctcgacctcgactctaatcggaattcgaactcgaaccccaattcaaacccatcaatgtcgcctttaacatcgaccttgacttccacctcaaaggcagcctccacagcgccctccctgacctggtccgccggttctccggagagcacgacagggagtacacagggacatgttgccgatcagttcggattcggaggggcgtatggtggggtcggaggggtatctccccagttcctggttcagcaatttcagaaccagcaacaacaacaacaacagcaacaacaccaataccaacaacaacagcagcagcaacaccagtatcagcagcagcagttcaggttcatccaacagcaacaacaaggggtcgacccactccagagcaccgggttcgatgctttcgggctggacgggttcgggtacgggtacgatcaggcgttcggacacgcccccgggcaggatcaagtgcaagggatggccccaggtccgaattccggtgagatggcagggatgacgtttggagcagggaacgggatgggggtcgacgctgggtacctcggacgtatgcagggatcgttcgaggggactctggggttcgggatgggtggaccggggataggcgtggaccacaactcggacttggattacaatttgggagactcgggggacgtcctgggtgaacaagaattgaagcggttgttgagcatgggggacggctctgcgctcgggttcggaggcacggtggattgggtcgggttgttacagggcgggacgacgctcgatcaggttcagggtcagggtcagactttggcacagggtcaggagggagggatcttgggtgtcaagcgagagtcgatcgatgatgccgggtcgacgacgagcacggccaaggggacggcttcagtcgtcgaggctggggatcttgccccggcgctcggcactacggccgcgacggcgacggcgacatcggccgtcccgcctgctcctgcatctaacccgaaccgatcaccacgacaacaacaatcgaaacaacccgggatcaacctgcacaacaaggtcgagaagcgttaccggagcaacgtcaagaacgccctggattccctacgcgacgccgtcccccgtttgagacaagtgtacgggacctcgttgcccagcgaactcgagacgacggaccgacagggcgaggacggcttgatgggtgggatcggcgagattgggaaaccgacgaaacagaccatcatgctcggcgcgaggatgtacatcgagtacctcgagatgaagggacaggcgggagaggccaagagggagaggagcgatcgcgtattgatgcgcttgctcggcgcggactcgcaagaaaagtgggcacgatgggagcaagaacaggacagggcggccagtctcgccgaggaagagtacagacagggactcgagaggaaaaatatcgagagggcgttgatgctcgccccgcccggaggatcgacttcgggaggttcaccttcgtcatcatccccgcctgatggagcggacgaggacgaagaggaggaggctccgcccgtacgtggtcgacccaagaaacgaccgcgagaagccgacgacgagtccgaggataagaaaccggtcaagaagaggcctaccgccaagatgcccaaaaaggccggtgggaaaaaggcaacgaccgtcgagaccgtcacgggagcgagcgccgccgtcatgtactcgttcgggttggcatacacctttttccctcgagccagctcggtcttcaggagcacagctcgacaggaacaggaaacccaaggttcggcgtcggcaggatcggtcatcttgtcagctccgtacagagcggccaatcattcgacgcacctgttgaagcgcgccttgcctgaacgtcatcacgacttttgggtcttgaagccggacgactttttggattgggtaggcttgtttttccttgcaagtgtccttagctggattacctggaggttggccaagtctgtcgggctgatctcgaccggaatatccaccggggtcgaagaggagcaagcggaagacgcgcacgaggccgccgttgatatcttgaccgagtctacttatcgtggacggatcgggaccatcgtcgagggcctcaaaatggtgggcagcaagatcggtcgacggactagcgacgaagtgcctactgtggaaaaggcctggttgcgcatcaccaagtcgtttgtcggaaaatgtgagtcatctgcgcgcatatcgatttcagacgcctccctggaactgaattatcccatatcatcttctagctctcgacttggacgtctggacccagacacgggttcgatggagaatggctcgcaaggccgcagaagaccctcaatacgctacacttcaagccctctatactcaggatcctttgcactggcaacacgcccgcaggatcgcgctagacaccaccgacaagcagattcaggatgtcttagcattgccttccaccgagacacgcgccttgtcaaagcgcctcggaccttccgaagatccggtccgaaccattgccgaatacctcgtcatcacccatctagacgacctcgccaccaggctttacatctcgctcgtcgatgccagcatctcgtccgaagtcggcgtcaacagcgggttgatgtctctggccgacgtgtcctataaagaacaaatcttcgaagccctccacggcgtgtctcgcgagtctcctgcttactcactgggtctggtgctcatcggtctatgggggatgctgggcagacaaaacgccagcgcccagcgatcggtagccaacatgctcattgcgagccagctaaaggaccgagtcgacttgccttcgatcgatgtcctgttaggcctcgtggtcccggcttatcgacccagtaaacgggacatggcgagcgatcaccaagttggcagattgccccttggcgtcgcagaattggataccctgctcgaggtctgcctgcgctacgtctcgctcgtcaagcgactcgaatcgcgtgatcctgcgtcccgtcgaggcgtctattctgaaacgcttcggatccgtcaattgctcggccgacctacctttgagcggactttcagggacatttcaggttacaggctgaggacgggctcgtcaagctcggacgcttctgcctccgacaccgagtcgatcgcgagcagtgaagaaggctcaatttcggccatcgaggccgaggtcgaagcatttgatgtgcagacggacaaattgattgattcgttggtggaccttggccacagggctgttcgttcggcgccaatggcgtgaaattcaaacagcatgacgttgtaagcagattgttataatacagttctcgttgtaaatgtgatcgagagtccgcgaaccgtccatatatgccacgaataccgggctgtttccatactctgtatgctgtgtttccctgaagaatcacaggattgcgacgatgcggcatatcgagaagacaatacgggactggagtgggagccggtcagaggaatttcgatatctttagctttcaaaagtatccatgccaatcaaacgatacaaatgtttctcgacttcggggaacagttgtgttccttcgtttgtcgcaggcagacacgcccagcttttcaggccttgtcagaagcctgtccgtcagcaggcttcgaaggggcaggtgtgggatcgatgttagcgaacttgcccgccggcttgccccgacgaggcgagcgtgccatctccacgggtgggggggaaggcgtctcggccctgtcggtgcgctcggtttgaacactttggacactgctggtaccagtagtggaagagttgcgggcgctggaattgtagctggacatcgttgaggtagtcagtagttatgatgatgtgctttgttgtgattgaactataatgataaggatgctgcagtggagaacacgattcggaccagctatttatgcaattccaagttggattggacaatgttgttctaggcaactggatttctcgttgtcatgccttccattcacaaattcaattcacaaggcatacatcacgagcaggcccagtagaaccgcatggaggccaaatcagcgagaagcctcggcgatgaggttggtcatcaatacccatactcataccgcgtcatagaccttattggttcgcttgactcaggtctgtccactggttctacatggagaagaatgtccttcataccccgcctcagccaatccgtcagggtaattcgcgcttccatcaaactttcgtaagctcgactatcacgccattcagaacatccgttcaccttgccaagcgaggtacagtgctttgacatatcgctctgacgccatgtcgttaatcgtcactccatcgaggtatcggtacattcttcggtcgaatacgctccttggacaacgagttccggtctggtcgatggggattctaatccagggcagtaccacctgcgatagtacttcctcccaatccagcattctccttcttccagtcttcatgcgccgtctcggccatctggaccatgagctcaaagtactttttctcgtacatgaccttgttcggtccgccccgcatgacctcgcgtcgaaaagcgaccaagacgtcgctagcgtccaatttgtcgtcgaccttgacgaattcgtatgggttcggctttgacggagcggccaacatggccgtcgtcgagtcattcatcaagcccgagccctttttcgctcgcttggccgcgttcaaaggagtgccctcaaaggtgcgcttgttgcctctcatacccgccggccccggggtcgacggcgaagacgcgcccgagtcgatcttgattttgccatcgagaatgttggctcgcttgtactttccgccacttcctaatccacctacgccgagcctgcttccgagcggagtcttgggagtgccacccccaccgccgctcatccaggagtactttttcgatcctcccatgacggccgcgagcgccctcgccgtctcctttttctgagcttcttgggctcgacgagcggcgaggtcttgttcttgttgaggattcttcttgcccgtctttttcttggccgcaggagtctcggccatggaatccggtgcgaccaacccgggggtcgatgggcccggcgtcgagggtccagaggcagctaggttgctaggcaaggtagaccccgagagcggtccatcgacttgcatgccgtcgtcaccggccgattgatcatcaggctggagcgtccttccctcggcttcagcctgttttctcctatcccattcgctcctctcgataaccctcgtgctcttcttggcccgctcgctctcctcgatcgcggcgtgtgcggcgaagatgtcctttctcggatcatccagaacgtcgaccttccacatgggcacctcttgcctatcctcacccgcatcgacctccatgccatctttcccttcccttttcgcgatcgaccccgaacctggccaaaaaggcgccggtcgagggttggtatacgccacccgatgatccttgatcctcgtcgccgaacgcatgatactcgcgagcataccctcgacggctcgatcggccatgaccatccccttgacgtccaacgagggtttcaacccggcgcgttcgatctgcgtacgagcgtgttcccgtgcaagaggttcggcaaagagtctgccctggccgacgacgctccggtcgttctgcccgatcatacgggtaggtgccgaggaggaggaggcagaagtagaggaagaagagtgaccttgggtcgtacgggaaaaggtggaaggcccggcctggctcggattgtgacccgcgacggtcgacggtcccgtcggcgtgttggctgtcgatgccgccggggtgttcaatgcagagttgggtgggtgattaggcgtctgtccgccagagttggggacgatagggaatgcagaagggatagtgatgttggtaggctaccgggtcgggacaaggacatctcgagatcagtacgaacgtccatgatcatgacacgagtctgaccttgaaactcaccctattcggatgacccatgcctcctggtcccgtcgcacctccaggtccagatccgggtccgggtccgggtccaggtcgaaacccaggaccacctgcgatctgattcggcccttgtccttgtcctcccgccgacccgttcggattcgttcccgctggaggaagcggaccggacctcggcttgtcccccgtccgatctaacaacccggacgtactcgacgcttgatgcgaaggtgcgggtggggcgtgttggccgcccgtgttctgactgggagctcggttgaggggcggttgtgaaggaggaggtgtaggtcggatgggctgggtctgagggttcttgggtttcaggttggaaggctgaggaggggctgccagtgcggtcgatgctggtgccggtgctgctgctggtgctgatgccggtgctggcgtcgtcgattgcgttgaggcggcagcagccgggggattgagactggacgcaggaggattctgcatgatgaatacgattggtcttgtctttgaccagattcgggttcttgtcctctatatgctttgtccttttcgtcgacgatcgtttctttgtgattccagttaagctgggtatgattcgattcgacgtcgttacaggcgatcggcgaggtgtccgctgtgccacgatctgacctatgacacttgctactactactggactatgtgatagacttggatggttgtgtttggtcattgatccgacgaccatgtccccactttgctctctgtttctcgctctcgcccggtaatatctcgcggaggaatcctagttgggtgggtggctactcgacttggaccccttgaacatgtcaactcgcgaactcgattcgacatacacactggaacctcatacacactttgctaactacaatcaagtgaacctctagacgtcaacatgttcgccctccgatccgccacgtccaggctacccatcgcagcccggactttcagctcgtccgcccgttccctcaagtgttacgaagccgtcgacgccgcggtcagtccttgttcctcccggcaactcggataaagttcaagtcccagactgacgacgacatcgtgtaactgggggatcgtcctgtagacgttcgaaaagcaggtatctaacggatcaggcttggtcctcgtcgatttctacgcaacgtgagtcgaaactcggtcattcccggggcgatcatcccacctcgtctcgtctcgtcccgtaagctgactgatcgatatatcgaatttacacctccctccgactcggctcggatatggacgataatcgacccgggtcactcggtcgtcaccctggatattgaactgtggaatgggtcatatgagcagatggtgtggaccttgtaaagtcctcacgccgaccttgaaaaaggtcacggagaaatccaatgtcgagtgcgtcccatccccccgcccctcgccccgcctctctctttccggtgcgaatcgcaaatcaaacgaggctgatcattcactttgtcctacatctcgccttgacttgtcatacccaccgcacccaactaccctgtcgtcgatcatctcgcatcggtcgatcaatcgcacgaaatccacttcgtggacgcatgggggtttccggatagtctggtcaccctggacgtcgatgtcgaggctgaactagcagccaagtacaaggcgagtcctctaccccctgcgtcatccttatttcgatcgaatcgaaccggtctgaattgaattgaactgaaatctcattacatgctattcatcttgcgacatcctcctcttcattcatctcccccgcttgaccccggggaccacgccgtgctcgacctgcctggggggggaacagatccgctcgttacccaccgtcatggccttcaaggacggacaacctatcagtcaattcagtgagttatgatcccgatcgatcgaacggctggctgcctgtgcgggcgagctgatggctactctcttctctgtccctcttcctcgtgcgtgtacgtgttgtagtgggagctttaccggagaaacaggttcagcagtttatcgatagtgtgcaggacaagtagcaggtagcaagtacagctttgttggtcgacgatgactagtagctggtagttgatggaatgaacgtatcaaactagacgtagaccgggatgagactcatggggttgctgacgttttctatttgaattgtttgttgatgatgaaatgacgtgtaattaaaatatactggcaatgttgactaggttgactaggaattattattattatttcgtttgttatcaaataattcgatcgaggatcgcttcgtcattgtgtaggtacaaaggtcatagagtagagtggtagtggttacatagctgcttggtctcgacatcaacccattcacgtacagacataggcatatcgattagcaacctagactttagcatccacgaccacgaccacgaaaagctaatttcaagatgtttttgacgaggtgagtgtgcggtcagctgctcgacaccggcgcaaacagaaatctcatgaaagggatgggataccgctacgaacaggtcggaatatgatcgaggtgtcaacaccttttccccagaggtgagtcgaccgcgacgatctcgaggagctcgtgagctgatccccccattctctgcgatgctggcagggtcgactgtatcaaggtgagcagaggatgatcgctacctcaagacacccgagccgacaactcaccttcgtgcccctctcccttctgatgatcctcagtcgaatacgccatggaggctatcaaactcggatccaccacggtcgggatcaccacgcctcacggtacgatcctcgccgtagagaaacgcgtccaatccaccctcctcgaaacgtcgtccatcgaaaagatcatggagatcgattcccacatcgggtgcgccatgtccggtctcacggccgatgcgaggacgatggtcgaacatgcgaggatgacgggacagatgcacgcgttcacgtacgatgaacccatcaaggtggagagcgtcgctcaggccgtctgtgatctggcattgaggttcggagagagcgtggatgatgacgaggccatgatggtgagttcacggagcgggcacgtgtggcgagcgtcagagtcggtgggcgacggcgaggggagatgctgatcgactccgaccattgtcgtccttgcccccgaggacagtctcgaccgttcggcgtggcactcctgatagccggtgtagacgaattcggaccatcgctgtgagtccatcttagctcgatcgcaacctttgccaaaaaggaaagaatctcatacgaccggattcgattctcgtcctgatgcaccaggttccatacggatccttcggggacgttcacccggtatgacgccaaggccatcggaagtggtagcgatgccgcccagacctcgctacaggacgcttacaacaaggcgagtccgagttgccctgcccctttccacctccccgccgcaagctcctcttcatccgaaggaatgttcgttgaactgactccacgtccacgtccgccctgcagaacatgacgctcgacgaggcacacaggttggccctcaagatccttaaagaggtcatggaggaaaaggtcgacgagaacaatatccagctcgcccaggtcagtacctctgggaccgtggtcgccgtcttttccaattcgggtcgcagaacgtgttactgattcgccctcgttgtgcgggtgtcgccgacaggtcgtccgagcagaaggcagcaaggaagccaagtttgagatcctttcgggggaggccaccaagcagctcatcgctgccatgtagagcgacgacacgaaatggggcaagagtttgtggggggtttgtttttttcgagatctacgtttgtttttctgctttcatatgacacgaccatgcacgactttttgtttcttgctacaaattctcctcgaccacttgtcccctcgtttgtctacggcccggttcgttcactgcgccgtggcctggtcgagttgcagcgtccagttgaacggctggaacgcgttgcccagcttggcctttctcgtctggttcaagctcgcgtccatcctgcgcggctttctccacttgcgggactcgaggcccaagaggttgccgataatctcgtgagcaaagtatctgcagcaaacccggcggcgatcagtgactgggcgtaactcgcagacagagtcccaaactcacctggtatactcggtcgagcccttgtcgccctccttgacgataccctcgttgtcctcgccaaacgtacctccggacccttcctcggtcccttcgatgatatgcccgtatcccttttctcccttgtggtcccaatgtaccataaagtaaggcaggttcgagaccaaactccgtcggaatccacccggtcggtcggaaaagtcgatcaacttgcggtgctgcgaccactcggactcggaagtcaagatggcttcacgaaagtacccgggagcgtcggcaaacaggtcggctgggagcggtatcgcttcgatgacggtatgcttgtggaacttgatgttggtcggcagtaccgtctcgaaaaacaagacgcccttgttctgttgcgcaaacatttgcatcaagcacttcataaagttctggtttcaaaagtgggtggtcatgcggatcagtatagtgtatctaggtggacgtgatggtcaaccccgctcactcaccttgatctcctcccattcgtcatcgtctagatcaagagtactggtgtaatgctgaatggggacgatgatgcagtgtccatccaccagttcttcgttttgcgtgcaagataggtaggcacgatgacctatggccacgatgggcgctttgggcggaccttcctcttgataacaaaaggcgcaggtatcgagcgcctttttcgttcgagcatagtctgccaccgaatgaaacgtcaggacgaggtgtagcaggcaaatgacgggttccactgaccgttcacagcaaacgcccgcttcatcgcgtcgttcttcatcttcttacgcgctaatcgttcgacattgtcgtccatgtaatcgttgtcattctgcaacccaagcccggattcagtttggtctcgaagttcgacactcgtacaaagacgcacctcgaatttggcatcgcccatgatggcggcggccatgctcgcgtccatgctcttttgatcggcagaaccagctccgaatcgttcctgcctgacgagctcgcccagcgtcgtctcgtcatcgtcagcgttgtagcgcacgagctctccggtcttgtgatctcgagtctcgaactgaacacaggcaagcagtcagcttccgacatcgacaaactggtttatggtggccgttcgagtttaccttgccgttcagcttcgggcgacggttaccgggcaacaacgtctgctccgtgccatctccagtgccaatgtcatacagtcgaccctgagcgtcaagagtgggcaagacctgcacctcggtccgtttaccccctttttgatccggttctcgaccgagttgtcctcccgcttgaccgtcccagagcccaccgccttgatctcctccgccggccgcatgtgctcgatgtctctcactctctcggtcatactccgcctggagatcggatgcggcgggatcgttcgaaagtttggctcggaggaccttggcctgcagggcgttcagcgcggacaagctgagaggcggggtcgaggccgtcggatcacgtccaggatcgctcgaaccgccttgtgcggttacatggggaatcgcggccgtcgacatggggttcctttgcaacaggtgatgcggcgtcaagacggatggaatcggcgtcgcgggtttggactggtcgaatttgcccgtcccgcgagctggctgggtgggtgtggccatccctccgacaccggcgagagaatggttgctggcggaccttcggagaccgatggcttcgtcgaatctaccctcttcacctggtcgtctgaacccggcccgactgctgggccgactactagcggcttcatcgctggtgaacatgaaccgcctgccgccaggcagtccacccggagtactcgggccgctgtcctctctcgaccgattcccatccctactgttgggcgtctcaaagcccgattggttgcgtctgccagaacgacgagaaccgcgatcgtccaggattcgacgttcgtcgacggcctcggcaaagtcttccaggttaccatacctctccatggcgacctcttccaccgaccgagacctgccaacgaactttgcttagcgtgcaacatcagtcttcagactcggcctctaataacgtactcctcgtcggcctgttcatacactttacgcagcttcatcattcgccattgactacctgccgaaccggcaacgatctgtttcttctcggtcggcgcgtattcctctacggatttcccatccttgagctgctgattgagctcgaaccgtgagactatcaactgatatcggcgatgaagtcgtccggtcaacaccaacccgtcgaatctcagcgggccttttcgtccgagcgatctcaccttgtcagggtccggcttgttgacctctttcttcttcctagccgtccccatatccgagaaaaagtcaccggtcgacccttcgggcccatccgtcatccctccagcgccccgatgacccgtactcaaaccccctcgagtctcctcctcgttcccgacgacctctctcccacccctcgagttgatctcggctgaacgcagtggaccgagatcgggcttcttggcgacatgaccgtcttgcccgaccacgagtccagggatcgtactggatttaggatcgagcatccaggattcccgggcggtatcgtcttgatcttgaccctcaaagttgccggtcgcgacggaaggagggaggtgagcgcccttgggtacgctgctagggttggatctgagcggtagagaatcccgggtggggatgttggagacggcgttctagaggaaacacatcctcgggttagcagcgatctatcgcgcacggtatgtggtgaggcatacctgaatgtccacctcgttcatatccttttccacccactcgtcctcggattcatcatcatcgaccacctgcaacccggaagccttgccggatttgtcgttccttctgtctctctttctcgaatccttttcctccctcctagccttcttttccttgcgccgctccctatcgtcgagctcgtcttcacccctgtcggaccgacgtttatgtttgcgttcgtcccggtcgcgcgatcgggagcggtgtttccggtgcttgtgatcgcgagaagccggtgacctggatcgttgtcgatcgctcggctccatgtttatgtgttggggtcagtactactgtgaagagtggtgaggcgattagagatgcgcctgatcgtcgagacttgctgaggaaagtattgtagtaatccccggtcatatagtgtgtagtagagagcataggaagaggttgggtactaggatagtagagtaggtcgagtcgatgctaacatctcggttgatctcagacttttcgaccttttaaacttgttgacgtcagctcttcagagtcggccatcatcatcagattcatcatcatgtcaaacatttcaatcattctctgccgttctcattcgtgtcgcaaggtacactacagtctctccaggtagatcactggtcacttatctcacacccgcttagagttacatctacacccccttgacacggttctttcccacacgatgtttggatgtatctgtgctggaagacttgtgtgagtcatgccacaggcaaaagccaagtcactacccagagctaatgcgggacatctcaggcagtcaaacgaacctacagcaggtcagtacatgactggaggttttggatgtatgtgcaccgcttgaaaaagaccgactgatcggtatacgtccaggtcaacgagacgagttttgtcttttcgattgagagagcgaacgagatcaatcacctgacggtgtttttattaggaaccggtaagctcgaacccgtttcttgccgatcagctcgagaacaagtcgatgagctaagattcaccacctccgtctcgatagtaccttttcccgacggatatggcgcttcagtgcatttccagttccccggtcgagatttcgtcaccctcggcacgtaagtcggtcgattacagggatcagacgcacgaaaggtatacgatacgggctgaacccatcgatttgcgctctgctttatgtgtacaccagactgacgaacgagcgaccgagctcgatctaccgcgttaggcctttccagccccagggacagtcagacccgtcctcgatgacggcgacgctaggtattcagatcgtgccgctcgatcaggtacaagctattgcagcgtcgttgaagacgccaatggggattgatgctatgaacctcggaacgccggtcaatgttgccggtgcgatggtcaaggcgggtccctcggcaggaggttcagacgtcggcaagattgcggaaaaggtcgtcaagaatgtaagcccaccaaggaaatcgagcttcgtaatttccccgcctagtctgataagacaccgattctggggtctgctctagctattcaactacctgcattcctttgaaggagcaccacagacgctcacaccacagacaccgatcccgctgggcgtgttccagaagtggtacgacaactttctgaacaaggtcaaacacgacggaggggcgggtttcctctcacgtgaagattgacacgccctcgccccgtcgagatggtcgattcgcccgacgaggtcgagttcttgttacgatgcgattattttgataagaccgtctgtgtgaataccaccggtccgaaaggatcggcgccaaggcgtccctcactcaggcggagtttgtgcggatgtccctcggagggttttttttccagtccgggtgcgggtcgatatggccgggcaagacccgagaggggcatcgtcatcagaggctgggaaagtgaaagcatattcgtttacgcttccgttcctaggtggatcgagtcggcagtggcagtggcagccgattcggtccgcgcagcggctctttctctccccgccagtagagacatgtcgcacttttcataggcgactgatccccctcttaccagtcgcctattcttcggtgcgagcagactgcccgtgtcctgaggaagagtccgactctcaggtcactgcagacagagtggtggagcgaggcagctccatgcggtgtcgtctcgtgtgttcgctcggtggcggccgtttgagcccgctgcgccagttggagcagctggtgcgcgctcgcggaacattgcctctgccgctgccatcggctgcttggtacggtcgcccccgcttattccgctcgtgagatttgggtacaggcttggtacgcagacgcaaagcacgagctttgctctttctcttgacgcgctgcgctggttgtgcgaggatgcattctagtctggccgacaagcgttccggccgatttggtatcgttggggcgtgaggcggaggagccgtcatcatcaggcacgaaacttgccgcttggggagcaattgagctgaaaccttgtttcactggctgacgatcatgagctgagtggacggggaaggggccacgacgaccctcgaccgcgatccggcttgccagagccgagccggcgatcatcccacattccacgttccacagtccccgcggaagaaaggtctcgacccgattctctcagacatggacgagacagccatcgcggcgtcggacttgtgcccattcccaacgacgtaggcgacaaatgaaccagggcctcgctcggcaggttttatctcggtgtccccgagcggtgctgtccgcgcaaggattccacaacccacgatcccgatgtcgtccatcgcggccggattcgttattcgcgagaggacattcccgatcttctgggcagaggttggcctggtaatcagggctcacgcagagtcacacagggcgaaagagcaatctgatcggaacagcacggaggcagctgacatcaacggcaatacgacgggccggagaaacaagggatccgattgccgcttcgtcatatgcgacttgtgatgggcctttggggatcgctttgaatctcaccgctgataacacgaaagcagacagaggccgcagcctacgtcgagccactctctaactcctcgtactcccccttgttctccgcctgcgcccaccggtactactggagttcgatcggctccggtcacagttcggaaacaatctgtccctgacagtgtcgaaaggctctcccccatcgattcactggctgctaccgcaacagtcgaccttggcccatcaggcggattggcgattacgagccacgcggcagttgatgctcgctgcccgcagaaggaaccggcaggtaataagaccaatcatcccgttgcgcagggcgacaaccgacgatcacctcgtggacccgtctcgtctcgctctcgctccgcgcattctccttcactttgtcttcgggtttcggtctttgcactcgaagacacatcgcagcaaccgaaggtcttaccgccgctagcaaggggatacctgaaaggtcttggggctgtccggagaatatctggaattacgatccgctaagcgtgcgcgcacgccgcgggcgacaacaccctcacgagcttcctaaaccgaccgggcatcgacccgatcaacaggtggattttacctcatcatccccatcgagaacgtagcctttcgactgccagtacggtcagattgcacgatagcgtgaggacagggaagcgaagagagcgtcggcgggatcgaaaataacccgtcttcgtgcatcagtcctctgtgctaatcgagccgggaaggatttcggctagacatatattctccggttcgcggtgggtcatctacatcacttgcgcatcgtccgcatcgatagccttcgttatttagatagaagcgtcgacgagtctctcagccttctgaaccgtcgcgggtgctctagacgtgatcggctgatcgcctgctccgacgtcgtcaaacgtaacgccggacaaattgcatcacccgataggggacccatcgtgcctccatcgacgattcgcgaacgcattctttctctctcgatccaacactcgatgcgtttgacagcatcccttcaatcgacactcatctagggtcgtcagcctctcgaaactcgacaaccgaaccctgcaacgaaccgcttttctaattcgcgacgatcaagggtcgacgcggaaaacctcgggatggcggaaattgttgccgatcaagaggcagaggtcggggatacggagaacaaggtcgaaacgactgcgacagtggccgcatcttgcatcgctatatgcgaggtgtcggcggaatgcagatatctctggttctcgccttcgatcaaggatatcctgggtgagcgagagacgcgcaaatcgccgagcattgcccgggccagctgatgagtttgagattaccatctgccaggatacgatcccactgaaatggttggacactcgcctttcgatctgatacatccggacgagagagcagcattagaagaagtcaggtagtcagtaaacaacgagcctttgccctcgagcgcgctcaaaacgactgacgcaactttgcacgaccgatcctaaagtcaaagcatggtctatgacaaggtcagtgatttgaacccaaatccgtcgtcgcacgtggctcattgcccttgtgacaaccgacagattgctacattgacgtattccagatggaaacacaaggatggacggtatctgctttgcgctgtgggatcgcaagtagtcagctgattatcgtcaagggaaaccttcactgactcgcttttcgaccatctacagaagtatcgtctgtgacaagattctgggtagtttctgcgtcgcagtgtcagagccaaaggcaaaacgtcagtcgacctttcggcgtctctccttcgggcgcggacagatccacctttgcgattcggacgcgctaaatcctccgaatcgttccgtttcatcccgccaacgatagtgcgggccgctactgctcaggaagtattggagatatctcctgaagcacaggatcagttccgaaagcaggtaagatggtctttggggaagaggtatcgcgggggccaaactgatcccgtcatcttctacgtctgccagaaatggtacaacagctcgcctccacgcaggacatcagactcgtttctcgtccgggcagatagagaaaggctacgaatacctctgaaagaattaaaacctcccagcataaggtcattcctcttgctcgatcgattctcgcaagcagacaacatcttctacatcagcaacaatcatctcgtaaaaagccctaccgaggtgagcattatcgtacatggggggcaaaggaaaacggttgatccctaatattcccataaagacgctcggcaagtcattctacgatctcatagcggaagaacatcggaacatgattcgatcagaggttcaaatggccaagagttgggccgcatcgtccatgacaggggttgaatcgtccccttttcaatacttgacctttgatctgattcagccggtaggtcatcacatccgtttcaaacgcacaagctatgctcaccttttttgaaacctcttccacagaatgagcgtgctatcacagtccaaggcattctcacagcctactccgatggagtcacttgcattattcggagaagatagtggccgtggatccgcattttcagtacatctttgatctctgcatctttctttgcattgttctctgcatctttctcgatcgcatcggcatgacagtcttctacgcattagtgtatctccaattgatctcgaccacattgtcctcgttgtatctatagtataattccccgtccgatctgatgcctccgtatgcatgtttctcgcccgcatgccagtgacgtacaacaccggctcaaagatcggaggtcgaccgtttcagatcatcgagctcgatttcgtctcgatgacgagaaggcatgtccaccttgcccgtaccgctcaacccagtgtcttcggggcggagaggtctgagctcgccgttggcgaacctatgctgacgtttctccaggtcaaacgcccacattgcggctccgatccggttggacaccgagaaccctaggccgatgatggggatggattcgaggagcgaggccgcaaaaccaaaggctgtagccggagccgggtcgatgtgagtggttgaaacgtcactcgacgggatcgagcgaaagactgacctcgataaccccaccgtctctcttgtagccaggtctcgacctctttgttggtcatctttttcgcctcgaaatacggcctatgcaagaccctggcagtgtacagtcccctcattgccgaagtaaatgccacgttatagatcggcaagtagggcgagagcgggaaaaggacgactgcgagacatggcgtctgttagctagtcgcatggggcagaggttcgcattgcagtcagccgcctcacagtgacgcagggccatctgagtgggccagaagaggaaccagcttaaccatttttcctgttgctgacccttggtgccctttccctcttgcccatctacacccggaggctgatcccattcctcgatgtaccccttgttccagaactctttactcttgccacgggactgtacagtcagatcccatgctcgagctcgggcgagtcggaggttccgcttgagaaagtagtggacgagcgaggtgagttgagggagtatgaagaggaccgtggtgtctaaatacgatagacgaccagcaggaaatttgagcttgacactcgctaacgtggaaacacttcgtttgacttacagtcgaccacatccgcctttttcagccatgaaaggctagtttctaggacttctgcgggcggggcctgcgcctttttcccaaacaggctgaacccgcccatgagaaagttttccacgatccatttctgtacccgccaggtcgctgcgacgtagaccccggcgaccaccaatccacggatggtagcatgcttcactttggcccaaacggccggtcggagcttgtcgtctgtaaagagtcggtatacaccgactgagacgggagatcacggcacagctcgggtcagttggacacttgcgctcacattgcttgtcgtggagggagggattctcaccgacaacatagtacggaggaaaggccaaaagttcttgaggcatgattctaccgactctttgaatgagtagatgtcatagatgaagggaaaagtccgagtgagatgttgagtagtggtcgagtagtctgctgatcatgaacgagatcgacctcgtccggtttcgtcatcaggatccgcgcggatggacacgagccagcctcgcttgatcgttcacccgcaaccgattctcatgtttgaatgttttctaaaagttgacaacgggccacgagaaatacaagactaacacgacagatgacaacaatgatgatgttggtgatggtggagccgatcgataagacctaggcagaagtgcttcgaacgacctcgtcgacggccttggcactgcgagtcgggcgggacatgaacgagaaacaaatcagctcgtcgatttcttctgccgataccaagacgtctacaacgacaacgacttacaaggtctcgacgttgttggtgttcagtcccgccatcgatatccgaccgttggctgtgtatgctctcgatcttagcagtcggctctggtgggccgtccctgaacactagacccggacttaccggtaaggtagacggaatgctcctcgacgagcttcttggtctgatcagggttgagaccggtgaacgagaacatgccctgtagcagaacgacataacaagcacgaatcgcaccgaacatcagcattctgttgttttgcgttccgttcccgcttttcaaccctggtcaacatcgatgacacgcacgatctgttccttgatgtgactccagtctttccttccggccggggcaggcgtcttgagcttgtcattgagcagctcaaagagggcgtccctcatctcgatgattcgacccgacatggtggtgatgtctcgcttccacgaatcgaacaactccgggtcggtcaagatcatcgagacctgcgacgggccgggcgggatcgaagttattagtcagtcaacctccgtatccctgcgatcagtatagggcgccaagacgggactcacgatatgagctccgtaagcgggagggttcgaaatctcgcttcgctgcaagacggacagctgggacttgaccctctcggcctctttggtatcggccgcgacgacgtgcaacgcgccgacacgttcgttgtacaatccggcgttcttggcaaatgactgtaagacgagacgaatgaccggggattttattttggtttcgcgcgcatgggatggggatgtgatcagtccatcagcgctcgtcggtcgattctcatttcccgccccctctcccccccccctggtcgtgtatcggggcggtacggatcgaggctgactcacctgacagacgagcatggggacctttttgtcggcaaacatcctcatcgaactggcatccctatccaaatccccagtggcgaacccctggtaagccgagtcgaaaaaggcgtaatgtttcttttgcaaaaagacgtcgaggatcttgtcccactgttcggccgtagggtcgactccctgatgaatgcgagagaaatggcagtgagatgatgggctcaccgcaagaacgtacggacgcagggacgactagactagagtcggggcgctgtactcacggtagggttgtgggcgcaaccgtggacgaggatgacggacctttccggggcgttttgcaagtcctccaagtagccgtcgaaatcgagagcgatggtctgcttgttgtagtacctgtacgagacgggctcgatcccgacgttggagatgatggcattgtggttggctgcgacgcgcgcgaggacgacgaggttcaccgggagagtcagtaccaaactcgatgtcccgactgaaaccacgatggacgacggtcggacgtaccccacgtagggttactgatgtaaatctcctttttgctcgtagggaattcgtaaaactttgcgaaaaacaaggcggccaagtgattcgcacccgtgcccgacaatgtctgcacgctgatgacccgaccctcatcgacggccttgctcgatcggccaaagatcagaccttgggcagccttggtgaattggggtagaccggtgatgggcaggtattcgtggtcgatgtcagggttgtcttcgagttgcctcgaagcctggtcaggcgagtcgaatgaggtggtggtagattaaataggccgagagatggaagagatcaaagtccgacgagatcgtggtggtgcagtacgaaaggatcatcagcctccgcacacatcgcatgacttctcaaagcaaaagacatgctctcccgttcctcggtcaatcgagactgaccttttttacggtaggcaagacccaaggtttgccctcattcgacctgtacgcgcctacgcccaaattgatcttgttcgggtgcttgtcggcaacgtaacgtgcggtaagttggaagatgctatcgtcggtcgtcgtcgtcgttatcgatgtttgaatcggaggtgatgtgaataggagaatacggatgggaatacgcagcgagtaagcagtacggaggattagccggtacttttccctcggagcgaagagagagatacgcggggggcgatgtaggtgcaacgagactcacgaatcaggaggagcctggggtacgttggggaacgcagctatcgtcccggatcgagcatgcaaggtggaacgagcgaagacaaaaagaggatcgagaagcgtcagtgtcgtcgagcctttgggacgatcaagtcgcagcgcgcggggggcgtgatagccgacgtaggtgtgtgtgcggggaggagggggggggactgaccgtaaatctcttgttgatcggacatttctgatgtttcttgtctaggagtgaggtgtgatttgatctggtccaggcgttgggtggaagaggatgatgacattggggtgtatttgtggtgggtgtgatatatatgttcgaacggaagacggtggtgatggtggttggtaggaggggaatgacccttttgactagacgctctgtgagtctgaaatggtgacgatattcgaaatcaacctacccaggctcgttgccccgcgtccgaatcttggtctttcggccttgcccttgcccctttgccccctgtcgccctccttccgcctcggctcattccttcctttgatctcgattgaatcggtccgagccgaaactagccgccaccccagacaacgctgcacacggacatgtagaacaatccgcagatgtccgcgatcattgcccccctctcgcgcgcgttcatatcgtgctaaaaaggtgactactcaacttgttgtcgacaaactggaccataagtcgttatttattacatttctgttgccttttggctttgatcatgtgtagtatctgttcttaatactctgacgagtattactagtccactggactaatttcgtcaagtaatcttttccgcctgatcactcctctgagcttgctcatgagcgatcaccttgtcctcggctaagcactaccgccttgagacgagacggctacctacttttttgcctcagacctcgtccttttatctctttttatcacgacatcaccacatcatggtcgacaacccaataacagacacacgtctctgcatccctggagacgcaagtcctgtcgatgtatcagttagaccgttcaatccggcgtctcgttctgcacgtcgaccgtaactccgcttccgtgctgaatgtatgcacctccataggaccctgcgtctcgaaccctgcaaaatcgagtatccgacttctcagcccaggatttggttgtcatcatggattcaacatctaccatgtgcgaccgtttgagctgtttcacactggcgagcaagtccaactttcgactggtctcgtgggcgtttcatcgtgatccagctcagatggcgattatcgaccgtgcccgctcgattcgttcacgagtctaccgtctattctgctccgagcaaggtttcctttccattcgtggttgtagcagggtgtaggcattgatgttgctcatgaccgaagacgagttggacagtatatgtaatcgtggttggggggaggcgggaaaaccttgcacgttacaggctatagggttggatagggtgtcaatgttgatatcgtcgcgaagatctagggtttcaggtctgaacaagctcgctcaagcccgcccttctaccggacgaacgtcgtcgtcttggtcgtcattgcggccggttccagtccacacagagccggacgaggtgggctcgtctggaacggcaccatattatcattgttgtacgggcacgcgcagacaagtatcaatggcgagacgttgcagatcatcattataggcatgatacaaacgaattctaaccccggactagctacaaaaggtccatgcatccaggcgtgtatgagtgagtatatgcatggagactgtgtcggtgcgcgcaatgtggtgatggaccagacaaagtctgaatgggcgcggcggggaagccggtgtgatttccaacaaggcagataatttccgaacaagatgaagaggtcgagaagaagcaaacgaaaacgaaaaacagcttgaagctggaaaaaatgcacgcatgaagaagcactagtcgaagattggcaaaggcaggatcttgtccgactggggttttcagggcatgaggaaattgtgggatcagctcgtcgttccagctcgtttggatccgtaaatcagactcacgttgaacaaaaagttgttggcggcatcctctgcagatgatggagcgggacggctggtcagcaaggccaagaaggattccaacaaacagactcggtactcacccgactccaagaacctcgtggggtaaacgactgcgggataagaacacgatcagacgtcatcccgtggatcccgactcgatacctcctcgactcacccaaatgtcctcgaatctcttccaacaagatctccatctcctccttttcccactcttgccacgcctcattgggtccacttggccgcttgttcttgccctcgacgttgccgcccccactcccgcctccgccggacccatgaccctcccgtttctgaggcccatcagtcgcacgggatgccgtatgtcgatgacccgaaccggccgggccctcggtagggtccaggatgtgatgcaaggacgaggccgacgaattagacgatccattcgacttgagtcggtctagcggatgcccattgacaatatcgctctgccgggtcgctgcgccctcgttgggtccgacaccttcttgacccacgatgccgcctccgctacctccgcccccagcgccgtgcgtgccgggtccgtcgtgcgtgaccttggtcggctcgtggtcgtctggagtaatgtcggtcggaaccttgttgaacttttccgcatgattggcaaacgccttgtaagatgcccacgaggtgacgagatcatcggggatgcatcggaacacttttcggtagatctcggtattgtgtaccgcagtggcgatccacatgtctttccaaaacgaatccagcaaagggtcggcaaacttgtctgcctcgatgatgggcgtcggcgtaggcatcgtccactatcgaggtcacggtcgtggtcagccatcgaaagtcacatcgtagataccgctccacactcacgggagacgttccgaccttggcggacaagtgctttcgcaacgtggaccgggccttcacagcgagcctgtcttcgtcggtctcggtgtgacgttcggtatccttgttaggtacctctttgtcctcagcatcggcgttggcgggaacaccaaacttgtcttgttcgttcgcggggcccgcaatcacgggcgccttgcccgagccgtccttgggattctcgacctcgtcgatagccttgtcctcgaactgctccctctctttcgtcgtgatcttggcctcgggaatgtcatggccctcgcctttcttgttttgctcgtcgagcgcatcaaacaggggctggccgttcgcatgccccgccgaggggcgtcgctcaaatatggtcctctcctcgagcgtgggcatgactgaacttgcaaaaccggcagtaagttcaccatcccgatcgtaatcttgtctctcgctgggatcccccttgggagctcccgacgtggcaaccgtgttatgttgggaaaggatggcggccggcttgatcaccacgttggcagcctttttgacgttcgagatcgcgttctcgctcattcccttggtcacggctccagctccgctctggatagtcatcagcagtcgatccctcgcgtgacggtgcttgaccgaagtcctccccggtacattctcgccctcgttctgttcgtgatccgggtcccacttttgcaagtggtcttcgtgagcgatcggatcccggtccatcagctgatcctcttcgatggcgtcgacgtctactccgacatgctcccgcatcaaacgcattcgtagactatgcgcaaaacgtccgaccttgtaaggtttgcccgccatggtgctacatcgaagatttgcgggtcagcggcagaaagacttcacgacatggacacaccaacttgcctatcgatcatgtcggtgtcacggataacagcagccaattctgaatctcgatctcctgattgcgatcgctcgttaatgttggcggatccacagatgacgaggcggtcgtctacgaccatagtctagatcgagggtgaagatgatcggtccaggttatttggcttcccgagcaagaggcaacttaccttgccatggatgtaaacctgctcggtcgtaagagctccagacttgaacttgccccatcctcgcagagcaaagaaggagatatattcgttgggctagaaattcaacgaatgtcagaaaggagcgcactgtggcacgaagcgacattgacttacatcgattccctctttcttcagtctggaaaagatcgattgagcgcctcgagaaatggttcggttctgacactcgaggatcagtcgcactgaactggcttcagcagtgtcgatagggaacgtgtatccgggcagcagagggatcatgatgcaagccttccaaggggtctcctccttgtgggctcggatgatcctgtcgacgatagcgtcaccaatgcggttcttaatctcgaccccatcgaccacggttgaagtgatgaagaattggttttcaatgtagacaaagtggtcagataattggatggctgagggaagggaatgttcagcaatctcctccttgttccgggtcgccctcgtccgtcactcacctttgaggtacgcgttctgaatcgaatgctcaagggtggtgggcgtgcccatcgaccaaggtccacacgatcgacagatctgaatctcacaagtcccttgcaaaccaaacgatttcaattccatctcggtaaagtctgcaggtggcaggaggaatggcattggccgcttgtggttctgggagatgacatcgtgtaagcggctcagtatcgacagtttttaacttagggttcagtctctgtcaatcaccttggtacgaatcaagtggttccatctgggcagccgatcgcaattgaacgtcagcctgactgcataggttcctggaaaagggtcgagacccacctttggataaagtgtcgacacaagtcacgggccggttgaccaacgatttgcaatccgacatcatgcctgaaacgttgcaaccctgtcaactctggctaattgcgtaccgatctgtttttagactgaccatggcatacggggcaccttcgtccgatcaaacatatcttcaaagggcttgttcagggtgtggaattcgacgactcgctcgtttgccatatccttgcctatgggtggcagcttctgtcagtcgcctcgacaaggtcaattgtcagagggagtctcacctggccaaatcggtccattttcgccgacggcaccaggctcaaagtcatcatcgaccagcacgtgctgcgaggtgtcccacctcccgtaacatctatcgccaaccagaggtcagtcgggtttgcataatcgccatctcaagaatggttgcttacagatccagacctcccatgaacgcgatagcttcatcgatcacgcagagtttctcgtgctgtcattgaagggcatttagctgtatgtgcgagcgtcatcagacaatctccgccacgtacatgtgaccagtaaaaggtaccggtttggaaatgcgatggagatcgctgtaccatgatgttgggatggagagacatcagtcgtttcttggcgtagctgcaggcaaagagggtgagctggtcgaactagacgagggtcacttcggttctctggcttacgtgctatccgtaggcgtggtcttgtccgagacctcgttgctatcaaacacctagctgtcagatcgcaagccggtctgttgagcggcttggaatgcttactagatgatgataaagatcttgacgccctcttctgcctttcgtttcaaaaggttgtctagtctgtacctctcgttaccggggcgtcggaggtatagttcgggactgatccaccctgttgcaaaacaacgtttagagtcgcacgagggtcaggctggtatctagacttacagtcatgaatgtacactgtctccttggccatgttcagagctcgactcagattccagtagtaatcccgctaccattcgccaaccgagtcagttctgagaagaccctgatcgaagcaactcgactcacaccatcgacaagccattgagccgcaacgttcatacggattggcgcgaacgaatcgaatcggttccgcccgccccagaccgattgcgctgcgactcgctccatggagacgatgaactgctgcatttgtcgctatgggaagagaggatatgagctccagttaggtgggtccggacatgctcaaacttacgacgttcttggcgaccagcttcaagcggcgctgggagctgttgatgtagaacgtgtgctgcgaagcgtcacgactatcaccctcgcctagagcttggctgtgctggctcaactttttctgctgttccttggtcaacgcctggcccgagcctgcagctgcggcgatctcgtggaggttcttgtcctctgccgaggtgtggttaccttctccttccttcgcattgtaaccgatggcagctttgagcgaaccttgaccagtcaatttctttagtccttgacgaagcttccgcttgggtcgctcgatggtaaaatcggggtcgatcaggaagacgtcgtagtagtcggtctgttggcaaggcactgatcagctgccagctacttgcgacattccgagcgcgcactcaccgactcgggaccgtccgtggctacaaagtaactctctcgaacgatccaccacttgggctcacgagcgtgtttccaactcgaaggcaacaagcccggctggttggctcgcttgctcgcgttattaccaaggatacgaaggaaaccggcttttccttggaagccacctcgcggagcgagtgccaaagtgagcgaggagagctcgaagaatcgacagagacgattggcttcagagcggaacatctgcaaggcgcaagcgtggtctaacggccgtctcgcacgaaagggcgactgcaaaactcacgactgcacggatcaattcgacgaggtactgctggagaaccgcgcgggactctcgactggcttcctgcttcgacttgtcctttcgagtcatgtcgatctccttggcctccttttccgccgtctcgccatcgagcttgccttcgaggcgacggaacttgttcaggtaggggatacctaggacgaagcggagcaggtcggccgggatgtacatacaggacaaaccgagccggactacgtactggtctttggaaactcggggatctcgatccgcctcgctcccctgatgtggctgacgcgtgttccgaggttgtctgctttgtagtgcgtatgtagcgagacaaagtcacggagctctcggtagatgacctgtagtcgagtgatcttgacgatgagcatttaagatcgtcacctgggtcgatgaagtgaacctcacccatttcaccgcgccatctccgtactcgcattcgatcctgaaaacctcgcgtcccgtctgctgtccgtccttgttgccggcaaacccggctgaatcgccgaccctgaatttgagggatcctagaagtaccgggacggtcctagctccatgttcgtccctgtccaaccaggtcttgaggatcatggccggcaactgtccggcgagcaactcggtcgtcacggggatctgtgcgggcgacgactgtttctccatgttggccgtctgtcggtggagcaatttcgctcggagcacggtccacttttgctgtcccgtcgactttggctcgtcgatcgtcttttccgcgtccaacggtccttgtaattcgactgtcgaaggggcacgcgagccgtttgtcgatgtcccgggtctagcgccagcggcagacgtaccctgagcaggtgcttcgaaaggcccgctgtgctgatccccgccctttctcctgaacgtcgaccagatcctctgattcttcggtcgcttgctcgctgggctctcgttggccgacatgagctcgttctgtcggatcggatcggccttggggatacgttcctcgacgggatgatcgggtcgaccgggtctcgatgtccgacgtgcggctcccttgtccatactaccgacgtgatcctgcccctcttcgttcctcagcctctcttcgtccgagctactcgacacgccgtcgtccgagcttgacgcagcgtcctcttcctcttccccgtaatcgtacctccgatcaccgtcgacgagcggtccgtgcttgtcgttcggtccgatgtgatctcctctcaacatcctctcatcgtcgtattctgcattctcgtcatcgtctggctgtttcttgagacccaacaagcgtctctccttttcccgggtcgacgtcagcttgtcttccgggtcgggcgcgtgccgccatgtcgacccgctgggaagatcctcggtctcaccgtctgccgagacctcgagcaggacgttgcccgcctttttatggagatcgggcgcgtcgacggtgtgatacctgatcttgggaacccggggtttcaagttgatctcgttccgtggacccggacgttcctcgcgcttgctaccgggcaagacgtcggggacctgcccgttctcggcgggtcgtcggtcctgtttgggaagacgttctcgatcgtcctgctccttttcctcgtcggtcatgttgtttctctgttcctctggatccctcgcatcttcctcggcgtggttctcgtcgtccctgttgccatgtacccgcgcgtcaccgtcggaccctccgtgggtcgggacctcgcgctctccctccctgtccatggtctcctgtttgctcttgccatggtaggcatgttccggccgatgacccgtgtaagggtaagacaagtcctgtccctcgggttgtctcgggggcacaccatcgggatccaaccagcgtcgttgggattcctgtgcgacggacaacctttcctttgcatgagcggacggatgatgttgatcggcgtgatcccgggcgtgagcttccaacgtccgggtggctcgatcgacctcgcgttgttccatctcttccctgccgattcgacgaccggccgaatgacccgtcaaatcggtatctttacggtcgtcctgcctgtcgtggtcgccatcgccgtcgtcccggctcttcccaccagccaagtccccaccgacggcctgtttcagcgctccagccgctttccgataagccgggtcctccttttccttttcccccatccgacccaagccttgctcggccccctttggatcactggcgagcgaccccggtccatcgttcttctcatcggccaaccccttgtctttcgcacgatccagttcctcctttctccccttggtcaacccggacccgggcatcccgtgactgaaatgccccgattcctgattcctgtctaatccgggatgatccccaccgctatcgaaccgctcgtgtaacccatccccaccgccctgtcgatcgtgatgcgcgtgcgtaggaacatggtccccgatcgcacgatgggcgatatccccaaacgtatgcggcttgtccttttcacccgagtgagagtggggttgagcatcaccaccatgaggcgcatgagaggtcgaagtggatcctcctccccccgtagccgtagaatccggtacagatccccgtccccgtccatctccacctccatggcccccctcgttgtcgtcgtcgtcgtcgtgacccccgcgatgaccctcacgttcgccccatgtggatccgagagacgagagcgtggatttctgggatgagcgtgagtgttgacgggagactaggggggtgtgggagaggatacggtccatcgtcgtcgtcgacgtagaggtcgatccggggttgggatgtaaaggtgatcagacagaggcctgaagcggggagcgggtaggtgaggtatgtctagctcggattatgcggacctgcggatgacgacaagagagggagtgtgaaggcaagaggatgatcagcaggcgtgctcgatttcgattaaaggggtattttacacggaagggtgtatatgtgtatcggtcgacgattgttgaatcgaggcgggcggggcgatgagaggggtactcacatggatggtgcgaccaagggttgttggtgttgatgggtgatcaaacggtaggtattacgcagtagtggcaagtaagagctgagcaaaacagaggcttgtcctatcacttcggtggtcgacctggtcaaaaaggtttctgatcggtgggatgagatcagatgggagggtttgtttattttgtgtgatggtcggtcggttaccacctaccaacaagtctcttcttgcctgcgtaaaagatcagatccagctcgtgaggtcgcggtatggatgtggttatgatgatgacatccgcagctctgtctatctagctatctacctgttacaatgtactgttcactgttctttgacctgacttgcgtgagttgcaaacttgcttgctgcgacgtcgtcggtagtcggtagctggtagttgctaggctgggtgagtcgctactgcggaatctaaaaaagcttcctccctccctcctgcgcctgcgcgcgtgtgccccgctttcgatccggttacgtcactttgtaatcgccctcgcccttgcccccttgttgctcgtcagaggccgacgacgacgacgaccgggtcgcttgcgtgcttgcgtgactgacaggggctgggcccaggttcacaacttgcaaagtgacacactctggctttttccgtccgcagcagcagcaacagtgacggcgtcgtcgtcagtcgtcagtcagtaggtcgccttcccatgtgaagagagtcgatgtatcaccgtcaactcgcgctcacactcgtaccgcgtacctctttggaaggagatcatcgcgagggtcggcgtttcaatcgatctcgagactagtcgagaggtcgaaacaaacggatcatcttcgtttcatcccgcagaatcgcttctcatcccccgcctctttcttttcgtgaaaagacaggatatcgactcgtcagattagactccccagagtgtattgacgatttcatcgcagacgcgttcctccccctcggctagatggtggccggggaaaggggtaccggagcccgccgaggtgtaggtgtgggtgtaagtgatccttcctccatatcccagggagaggaggtctgctcgggtgcgattcgacgttcccgtcgatcgtccattggacgtttgaccggccaacaccggactcggactcggactagggggagaaggccctcctctgcaccctgagcgctttccccggggctttgcgtttacgtgacgggtgagaaggactcacggcgatgggccccctcgacaggatcataggggaacacttgggatacgatcgaccggtaccggctcgacaagtacggctgcctggtttccaggccggactcccttgtcgatacgatacgacaggatctggtctggaccgtcaagcgaagccgaacctgatccgatgtgaaacgctccatgcccgaggtggtactggccgtgctggatgtgatttaccaattagaagcgcaataccacgatgacatgttgccgtaatttctgtctacagtttacgtgattcgcgtcgcccccctctccccgcgtgctctccctccctctcccccaacctgcaacccagctactcgctccagcgcaatgtcaacaaaagatgcacatcaactcacttcaacactactggtcaacgactaccttccccccccccctcttttctctcttcgccgtaaaatccatcaactcttcttctccgtctgttctctcgtcgtcgtcgtcgtcaccctctctctcgttttcgtccaggttctggaaataaatagcaatagccacgttcgtcacccaaacgcgtcgtttcttcaactagactaaccaaccgacagtagtagcagtatcaacgatcaactaaaagtacgtcccggtctagcggatgcgaagaggtacgagggacgggatactgatcaggtgttctctctctctctgttcactccgctccatcctcacgtaccgccgtcgtcgtcgtccgacactcgccgtctcctcgcgaaacacggaatagtgggtcgagaaatcagtaagtatcccgctctccctctcttttctctcttcaacccgattgcacggcaaatccgggactgacattcatccgatttttcctgatcgacagttcacctccagaccggtcaatgtggtaaccaagtcggatccgccttttgggacgtgtaagtcgagacccccctacccgccaaagataggcgcgagtgtggaacgtgtgtacgtatgggtattgatcagattggggatgggtgtttttctttttcgttcacagcttgactcaggaacacgggatcgatgctagcggagcgtgagtccccgttcggactcgatcactcggtcagagtattgattcccatcctccttcccgctggaacagtttcgtcgggcactcggagacccagttggataagatccaggtctacttcaacgaggcttccgccaagaagtgagtctcgcccctggtccccccctccccgaggagggggaggaggggaaaccaaacggacatgatgatcggatcgagacgcaacttcgtaaacagcttgaagcaggtcctctcgaacacctcgtgtggcaaaatccgctgaaggtacgccccaagcactgagttccagcaatagcctcactagctcacgcaggcccgctcgatcgactatgcagtttcatgttgacaggtcaactttccacttggcaacgaaaagtatactggatcggtgggtcttcttacgtgtctgattcatccgcagggactgctctgcggcccactctctcgcttgttccagaccaatcgcatcgttctcctccactgcgcgttcggcggccgtgtctgtcaatgtgatcacgctcaacatatggcaagtcgaaacgttgcaacgtcatctgacgtacctcggtcttccatatccacgtcttcgccccagtgtggagcttgaaccatttgtctgttcatatctttatctggcgaggtcgctaccgaagggccatcccgaagagacagagcattgccaaactgatgcgaatgatattgagcgtagtaggcaggagcaatggcgaaactctggggtaccgctacgggaacgctcggggacgagtagtgtgatcgtctaccgtgttcttggaactgagaattgtgaataccaacgacgggtccatttcgtcgggaagggtctgatcggggtccggctgaagggtatgtccgactggaagatgcgacaggcggcgctggcatcgcatagtcgtcctcgtaattgagaccagattgggtatctttgggtcgtgatctgctgctagtctccaaggcaaaaggtcgggaattcgatggcggagggaatgacatgtgaggaccggaaaccggttttccggtgatcaacgcatctcgatcgatgtactccttaaacttgcgtgcgcctctcactggtcgaccgagcgtgactcgcggccccgtgggtaatgtttgtgggtgagtcaatttagcggcatcgttgatcgggtcctcgtctgtcaattctccctcttcccgatctttccgagctgcagtgctggcttgaggcggtcgccttgtggttgtaggaagagtcgccttgggtgcctgagggcctatagcaggagctttctctgattgcgaggtccgtagggtagagccctctgatttcacgtcgaatccagtggttcttgctactttgctcgctgaccgttcgtcttgatcggaaagctgttcctgagtagcggagcgcaatcgtttcgtcttgttcttgacctttgatttcttcttgcgtttattaccggcactctgcggcgatacgggcaggtcatgatctaaagggacgttcgaaggtcccgcctccttgtcctgtctgggttcgatggcggcatgacggctcgaccctagaggtcccggctgactgacagcgtccggagcttgctcgccgttcttcggctcgttcgacgctcctagtgaatcatctcgctggtgcgcatcatggcgactttctgcttccttggactcctgctcttgaggattcggtcggctgaatgctgttcccatgttgaagacggaatgtgacccttgattatgcgatcatagaaagggtgacgggtggtaactgtcgtaatgattgataggatggatataataactgtccgacctacgaagagacagcatgaaaatcaaagtaggacatcagtcacagttcagtatggatctgtatagttgatgcaccgcgcacgggaaggatgtgatcgacttacatcaggtggatcgataggagagaccctcaacagacttatcgggggagtggcacccgcaatctcacttccaatcgggagggtattgggggaaccgaaccggtgattgatcggacgattgatagtgatagacttgtactacgtttcgtcgcccggccacgatgttatgcaagggcgatgacgatgatgatagaaataatatgactagtcggtagaacggtatgaagtgatcgctcggtcaccgggtcgaaatcaaggtgatggatgcctttaaaggggaagcgcgtcgccacaagcgcgctggtcgcaaggtggccggccaactgacccaggtgaaccatcattatccggctgatctgtcgtacaggtaatcatatagacatctccttctcctccctggtcaaccccacctcgtcgttcagcctgaccagatcatcatgcggccagaatttcggatcgttatcgttatctggccattccgtgcgccaatattcgccctctcgagccatcgagtctatcagtcccaggccgagccttggggtgaagaaatctacctcttgatcctcctctgcctgctttcgtcgattcacttcatcttcgtcctcctgaaaagaccataccgtcagcttttgagcaagtgtttcctcggcaagctactcaccaaatcgaattcgtcctccctctcgacgtattctcgattttcttccagctcttcaaatcccggagcgaaagcgctccacgcctcgttggtagtcgtttgccagatgttgatctcgccggctgaagtacatgacgctatcatcggtctagagggactccactagtacgcgaagccgaaccttgttttagcttgtgtcatcgagcggcgtgcatttcaagtcacactcacgtcgcagtcgtctagagcgtcctttggaccttccaataccttgatcaagacccctgtcgaccgatcccatacgtaaatgtgatgagaagtcttgattccggcgcctcccatcacgtattccccatcaccgctgaaagcgaccgtgttccagggagtcttgccgatcttgtcctggaaacggtgcaggggatggatcgtgatcgggaacagatcttccgactgatctagttctatcgttcgaggtgtaatcgccaggactcgtacggccctatcgctcgagttgattaccatgtatcggccggtccgatcaaaggcgatctgtttgatgagcgaagtcgctacctgttgcttccagatgacccatctcgtcctggcatcatagacgcgcagcatgccatccctggttcccgcatagatcctgtcgccactcggatcgaaggtcgcaaatgtgagactcgtgctgtggccgaggcagggaatcagcttcatcagcaagatgctgctcgacatgccgtcatccttcgcttaccaagccgactctttcgaagatggcgcttcgtcaaagagactcatttcgatctcgtgcaacgcttcgaaggtttcctcctcctgcaccttctcggaggtgtcttcatcttggtccgccgtagcttgagattgtgagcttttggctgtttctcgggcgaattgaagcgcttcctctttgctatgaggttgcaagtacagcacctcgtggcctcttgacaccttccgccgcttcctaggccgatttgctgacgttgttgagtctactgtatcatcgccgggaatttgattgctgaccggatcttcggccgccttctcacgaagtctcacaaggactacttcattgacggtgctcgtgacgaggagcacgcgagaggtttgcgggtgaaactcggcattgatgatggggcaatcgaggatgaagctgtaatgcagttccgaagaaggaagggtcgttttgtaggcactctttgatgggcccggctcgggtgattcgcggacgtctggcatgttggaaggggtatatcctagatcccagatgttcactttccaatctttcgaggacgtcgccaaatatctcccgtttctcgaccagctgaggcagaggatattgtcatccagatcggcttcaactgtccaagatctctcgtttctgaaagatgatactcacctcaggctttccacggccttgacgtgtccgtccagcgctcgaaccaaggcaccgttcgtcatttccatgtcccagatctcgacgatcccatccgatccacccgtagccaagagattccctgcccaaggtccctgtacatggttgaaacgacatctcagagccgtcgtctcatacgtatgatcgatcgtctcgggatagtcctgggcgaacggatctagcagtgatatgcgcatgaaggtcagtggaggcccgagccggttcgtctttcatgggtcgtactttgtaattgttgggccatcgcaactcggaaatcgacttctcggtcggaccagggtatttatcaggtcagaaggataaatctcgtccacaaccacatcgctagccaaacacagggctgatagaagcaagcaagtcataagctcaagttcgtacctcaccaagggtatcatcggaagcgatcgactttctgatctgagcgttgttgtttactttttgggtcgaatttcttcgacccgctcgctccggacaggttgctatgcatgtatcatcgtgaggctgctccccaaagagctcgttagacatcgttgaaaggtaatttgtacaagaggagtaagactggtcgacgggcgtaggcctggactgtgcaggacacgctcagaaatcgagcaagccggcgacgtcgagcttgagcttgaacgaatcgttcgggtcccactccccgtaataatcgcagctgaccgggttgacgggtccagactcggagcaaaagccttgtacaggacagagtccgcaaggcgcttcgttgactggccagttgaagttggatggtcggacggctcggtagacgacgtccttgtcgaggaaaggatcataattgtcgtgaaagttgaatcgtccgcccatcccatccgccaggttgaccaacgggtcattactgtcgagataactgccggggggcagctcggtcttggctttgcgcttgttcttggccttgccgctcgaactcgaactgtcacttgaaccggacgagttcgagcccgagtcggaatcgctatcgctatcgctgtccgaatccgaagaatccgagtcggaggaactcgaactcgagtcggatgtactgtcgctatccgaagacgaggacgaggacgactttttcttgctcttctttttcttgtcggcgtccttgaccgagacgagctcgtcgctatcgttgccatcagcctcggcgtcggatccttcacccttgacctttgacttctacaccatgatgacgcaagagcgaatgatcggcccacactcggcgcaggaacgagtcggctaacaaggcacgtacctttcgctccttttccttgcgtttcctcttcttctccttttccttttccttgcgcctcctctctcgttccaactttttagtctttttcagctcttttttcagcttggccatcttctttttctgcttcttttctttctccttttccttttccctcctcttcttgtccttgctcttttcccgttccttgtcctttttcctgcgttttcgatcccgctccccgcccgactcggaagactcgtcgtcactatccccaccatcgctctcccccgcgctctcttccggcctgggtcgtttctttcccaccttggcccgctccgctttgatcttggccacctcgtcctcgtccgccgcgcctccgtcctgctccaaatcagagttccatccctcctcgtgcatcttcttgatcggtttgatgatctcgacccggccttcgtacaccaacatgctcatgatctggatgatatgctcgacgccgagcttgatcttgcaaatgtcgtgtttctcgaaataagtcaagatggccgccggaccggggagtttcgaagtatgtgatggtgcgtaaatcgggttgggaacgtagatctcgtcggggatgttactccgcttaggaatctttcgagggaaactctacgacgataccccacaagcaaccacctttagcgaccgacgaacgaccggggtttccctttttttctttccagccgagaagctcaccttttcctggacgaaccgcagcgccacggctgacaagtccgagatcaacccgacgtcgatattatgcccgtcatagaacggtcctccggtcaactcggccgacggcgtgatcccgacacacatgtacagctttttcgtaggcgcctgcagtagtgaagcacgaccagtcaaattcgaggtgaagatcagctctggatcacgactgtaagtttggtaattcgtttccgacccggatagaggacggaaattcggatggtactcgccttgatgctcttgatagtcttgatcaggtccctcttctccaacgtcctgatgaccttcatcaagacggtctgaggcaaattggtctctgtcttgatactccgaatccatattcctgcgattccgagtgcatccaatccgatgtcagcgcgagtggataatgcttaagacggacgagtaggatggggtgtgggcgggcttacccatgttgcccgccgatttgatacagttgtatgctatctgttcgttctgatcgagagctcccgtcctgccaaaaaaaaaaaaaaaaagagcaaggtcgacggatgagcgagccgggatgacgtgtgttaggagaccgtcttgggatgatgaccgactttttcgcttcgtccttgttgacggccatgaagaatggttctcccttttcattctgtttcgtgatgatcaagctctgtgcggtgtgccggagaagaaacgttagcgtactggcaagcccggctagatgatatgattcagtttaccttggacatcagcccgttgagcgcaccgagggcagcttgaggcgtatgaccccgctgcaactcggtcgccgacaatgtctaaaaccgaacggacgcatcagcccttcgagtcgggatatcagacgtcctctgtgcatcattcactgagtccctagcgctcttgagctttttccaaaattcattctcaagaggcgtgagcctcgaagccatggcgttggacatggttcgagcggtctctcgaaggtcaggtagatggatgcactaccagggaggtcaatttcccaaggacgctcgacttgccgcagacgctgccgatcaagtccttatctcgttgacacctctcctttgatgctcctcgttgttcgtccgctccgaggacctgcacgatgtttgctgatgtcgtggtcctgtacgaagtctgtgtcgatttcgaaatgacatttcaaaagtcaaagacgtcgcgagtctgttagcttcgcccttgaccgtcgaggggttgaccgcgttttgtgaaagcggacataaaaaacaagctgggtcaatcaatatcgatgtccgtcgttcattcatatcgaccacctagaccattgactgcagttatagtacggaagttgcttgctatatggcacatacaagacctcaaccgactggaacgtgattgacaacacgacgtaacctagcaaatcactacgatggatccggaagacgatcaaccttcactgtcgatatgcatgctcggcgcgggtcaggaagtcggccgatcatgctgcgtgatcaagcataggggaaagacggtcgtatgcgacgtcggactacatcctgccaataacgggatctcggcgttgccctttatcgacgaagtggattggagcacggtcgatgccatcttgatcactcagtgagccttatcccgttctcctgccgattcatatcactcagctagacttcttgcagctttcacgtcgaccatgcagctggtctgccatacgttacggaaaaggttcgtcttttgcatcacgctacgatattacctggcaaggtactaaaagtccgtctgcttgactttgggtccacagacaaatttcagggaaggcaagggcaaggtgtacatgacgcatccgacgaaagcgatcttccgactgaccatgcaggacgccgtacgaatagggcaagtccgctcttccattcatccacctgtttatcgaattcgctgaccttggacgaatgaccgaccgtatcatgttctttagagacaactcggaccaaggcgacaagctttacagcgaatccgacctcgactcgtgctggcagaacatcatcgccgtggattaccaccaagacatcgtcatctctggcggactccgattcacgccttaccacgccggacacgtattgggagctgcaatgttcatgatcgagatcgccggggtcaacgtcctgtacacgggggattactcgagggaagaagatcggcatctcgtcatggccgaggtccccccgatcaagcccgacgtgatgatctgtgagagcacgtttggggtgcatacgctacagccgagaaaggaaaaggaggagcaatttaccagtgagcatacgcgctagacgtcttgtgccatcgtgggtagctgcttagatctctagtgaatgcgcagcgctcgtcaccaacatcgtccgaagaggaggtcgatgcctgatgcccatctcggcctttggaaacgtccaggagttgctcttgatcctggacgaacattggagcaaccatcccgagctacacaacattcccatttactacgcctcgggtctcgcctttcgcggaatgcaagtctataggacctatatccacacgatgaacgaccacgtcaagtccaggttctcgagggaccggaacgacaacccctttgccttcaagtatgtgagaaacgtcaaggatttccggaaatggaaggactcgggaccttgtgtcatgatggccacgccgcagatgttgcaagggtaccacagtcgagagttgctcgagaactgggcgccggataggaagaacgggttgatcatcaccggatactccatcgaggggaccatggccaaggtgagctttgacgtgtcggtccacagagaggttgaagagaatggagatgatgaggcgaagactgtacgatatggtaatcctgcgatgacgaatatgatcatcgatgaaaagagggccagacggctgcgagaaacgaacgaccacagtggccagcatgccgagacgtaaatgatgtccgaatctgctttcagaaactcactgctgtctgcacgcccccgtctttatgtccgcctttcgtgctttacagaacctgctgaagcaacctgacgactttatcggggtgcacgggaacaagatcaacaggaagatgacggtcgacgaaatctcgtttagcgcacacgtggatttccaacaaaactcgaatttcatcaaagaggtcaaccctcaacatattgtgagtctccgggacagatgatgcgccgatgacgagactgaggtcgtcttcttggcacaacgtctaggtcctggtgcacggagaacagtcggtgatgggtcgattacgagccgctttgcagagtcaatttgcggattccgataccaaagttcacacgccgcggaattgcgaaccgcttgagttgagcttcaccatggagcgggtggtcaaggtacgtcagcgaatgctttaacgagcgcgctaccactcagcaagctaaacacgtcccatttcacaggtcatcggctcgctcgccgccaaaccacccgtcgacaaggaccctctctccggtctgctcgtctcgaaagacttttcatacactctcctcgacccgaaagacctcaaggactttacagggctggggacgagcgagatcacacaaagacagcgggtgaggattggggtcggttgggaggtcgtccggtggcacctggaaggcatgtacggcgaggtggaagaggacgtcgtcgacgagcggcccgttttcgtggtaagtccagagtgtcagttccggacgggtgttcgcgaagctcaacttgtcgcaaaacaggttatgaacgccatctcgatcgtacgggtatcggagcaggaacttttgctcgagtgggcctcgagtgggagcaacgacatgattgccgatagcgcgctagccttgctgtccggcatggattcaaactttgccacgatcaagagtgagtccggaaatgatcgagacggttcgtcagcgagaagctgatttctttactgatcggtcatagtgacgtcacggccacatgatcatgcgcacgaacacgaacacgatgtgcaagacaaatcgctccccacagcttcctctcctgacgagtccacgccagctgaagaactccctagcgatattcatcgactgcgtctcttcctactcgctcactttggcgatgtatcgatcccgctcatgcaagaaaccgagggtcgggaagatgacttgttggttatgcgtgttgaagtcgacgggaccgtcgctcgagtagatctcatgacgatggtcagtccccctttgatccctttcgatcgcggaagagacacgctgatcctgctcataccataaccaatttcgaaacgacgttccctcggtaaaggtggtcacatgcgaaaaccctactctacgacgccgagtagttggcgtactcgagatggcccagagcacgataacgagcttggctagaggtttcgtcggggccggtatacccgggcgcatcaaggttgtagcgcagaaggatgaagagaaggaaatgcagaaagaaggctttcaggagagtggccatatcggtgggacggagagcaagatcaatggagtacaggaagaagttgtaacttgatgagacttggtcgtataatataatccgacgccatcagaaaaaggtagatctggacctcaaagtaccgctatatgcttgcacttcgtcaacgcctactcctctttttcatgtaaaggtttttttccggaattgcttgggtaggaactcgtcgggcactatggaggggattgcatctgctgattaccgtcgactttggtgtttacacctatcacatgatatcgctggagacatgatgggttaacatatacgaaggtcatacaaaaacctgcttcggggagtcattcgcgaagcatctgggagctttcaagtactttataacaaggtgcctcatcaaggctattctatttcgacgttaccgcgcagcatcattgtccttggcactctcattacatccatcccagtccaccgtcatgccgtttggaatcgatgacctgccttcgagaaattctttctctatttggaggttagcaccatcgtatcagaaacctatgcatacgagtggagaaagattcagtcgacgtgaattcgagagggggaccgctgagaatcatttaccatcagacacccctcgttccgcccaaccctttttcacccgactgacaagccagattgacatcgacgtttcccgatctcgaccgatgggtggggcaatttgttgcaaatcgaggatcgagggtcagatttcgatcgtgggaccgccctactgacaacaatgatccgtacaacttgagtctgacgccagagacctacacaaagtatggccatcgagcctcaaaagccagaccgtgactacctcgcctagctcggaatgaggtggctttacgccaggccgagcattttgatgccgtgttttgcggctcgacgtcgcgccattcgagtatcaacagcggagtaacgatacacacacacacaaccccgttgcttttcccgactgtattcgcaatccaagcaacgttcgtcaagatgcaaacgaattgcaccattagctactccacaactcccgctaacggcataacacgaggcccgtgaaatgataagatcaaccacatccaacttctgcgttctggacggacgtgtttccgggcctgatcaaacttgagcccattttttgtctgaggttcaagtcgagcttgattcaggaaacgagcccttaatccggccctgagcaagactgtgcttcaaaagagacggttgtcgctcgattcagcttttccaatcgttaaacgcgtcgatgacatatcgagtctcatgatcgaagctacgcgagcgagtactgtcgagatcttgaaacgcattgacaaatagggacgacggccgtattctccgaattaccaaaccacgactgtatcagaatgatcgaatcggaccttgactgctgagctgacctagagggagtcagctcgtcggatccgtagacgaagcgctattcattgagatccgatcacaccgcctatcgtaggtaagatgcgaagagctgggcgcgcgcttgaacgcatatcaaggcacgggttggagcagccgtaccttgttaagatgatggctcgatcgaaattgtcaattttgataaatctccctgaaacagagtttgccaattaccctagggtcgttcctgccgagcttggtggtcgagtcgtcgtcgccgtcgtcattggtgaaagggtgatggcgtttgtatgatcgcaccggatcggcgccgggtatgactgtagaaagtaacgacggtacaaggggcggactcggcaatgtcatctcttgcgtaggtgtaacaggtcgcaagcatgactggtattcgagtcagctcttggcctgcatcattctgtctttggacagactcggtgaggttcttccgatttcccttccatgctcattcatccgacttctatgggatctgcgatgccagtcactatggaagcatcgtacgtaatgtttgaccgtgccgctctactctaggacggtccaagccttcccgacgatgattattgtttgtcattggatctcaaccggctgttcctgtcattgccagtagtgagtcttagcgcgcgtcaacatcaggcaccgtcaaagtcatccttagcgccagtcgcgggaccacttcaatggaaccggttggtgactcacaatcccagcccccagcttgaagtttcagtcatcaggacgccagattcccgaacccctcacacaatgcccctggttcagttatgttgtcagggacagttcaagcttgctcagttgaaccagttcgggcatcatcgatatcgcaagtgatcatcgagctgcggcgcatattcaaatcagctcgtacgcactgtcacgccacgttcaagcccagaagtccgggtcattcaagttggtaacaaggggaattactgacgtgcctgatgatcatgtccggagcaagtcaggaaactatcttcaagcccgtcccttgcgcttgacgaatggcgtgagtgatagcaacgtacggttggcgggagcacaacctgtctcttggagtgagaacgttgagcgatggcgacatcgacggtgggcgggtcgcagggaccgtgaccgtgcagtagactcgaatcatctcgagacctggtctcgtgaatagtatatagtgtcaacataatctgttcgatttctctttccccttttcgtttcttcttctctttcctcaccaactcttcacctaactacaaccactctaccagacccatcaactacacccacgcaccacaatgaagttcttcaagtcgctcgcctttgcccttcctctctttgctgcgttcgccatcgccgcccccgctgttgagcagagggaggtcgccgtcgtcgaggacaggcagttgcctcaaattcccatcaccaccgccctccagggagtcctggacaaggtcgtaagtcgattcagctcgtctatctgaaagactcccgctgatcttctcgctcatcccttggcgcacaccgagtagaacgctttgaacggggctttcaccctcttcccccaggccaccaaggtcatccccgccttgaccgagatcaccgcgatcctcaaccagctgaagacccagttgcccgacttggccgcccctcagaaccctacccaggctgccaacttggtcaccgagattgtcgactccatcattgttcaggtcaggaagatcactgcgctcgctagtaggacccctgctgtcgtgagtgaaggccggccggggacggacgaacggtcaaagattgatcaagcgcttcgtttcgaaacagggtacggctgttagtcaactcgatggagccttgaacggtgtcttgggtggtctctccggttctctcggtagtggtaagtcatggtcctccccctgactgtctgatcgccgccttgccatactcacttgtcctcgccttaccgctcgctctcacaggtctcttgcaaaccgtccggggtctcctcggaggtctcctcggatttatcggaggtcttttgggaggaaacctcttgtccacccttcccctctcgctcaacaccatccgagccgcctaagtgcgaatcgagatcgagggagcgtccagggtgggaacgaaacgaaagggtcctgtccggttcttgctagcgggatcgaccgggctccgacgtggaaaccaggacggacgataaagaaggcagcgggtctactcgccgtgtcgatagtcatttattaatatgaagtggtatctagagctctgcgagcgatctagactgttcttgaaaggtttggaaaaaggaagaaaggagcgtcagcagggaataatacaatggaatacatattcaatctatcgtttattgacgacaagttcaagcttgcttttgtgcatgatttccgagtacctcggctgcagtcgtctctgatggcgtttagctctccgtcaagagcactttgtaagacactgtgaatcgtggtgtttcatagtgtggtaccgaatcggcatggaccttcgattccgacctgtacgttgcagagatgtttttgaagttttgccatcacagcctgcccatcacggactttgatattcgtagtcagtgtaagcagcacgcactccagctatcccttcatctcgggaattgaggatcagccagtagccagtgccagtgatcagtagtaatggtgtagcctgccgagagtgatattttcgggtggtttgaccattttcgggttgaaacccgatgacgcgacggttgacgacgagtcccaggtccattttatgatcggaccatccgatatcatccgtgatcaacgtcgaaactcgaacccgggactagtctgactaggtcgaggcagtaaaagtcatttcgagtcagagttcaaggtcgtgcgtaagaggacatagttgatcatacttgcttctcgtataaacttggaacgacagtgatcacagcattgtcccggcgtcttccgcgacatacacgtaaaatcaaacattctaccttcctaccgcatccgtcaaccggtgaacgtgctaccccttcaaaaggaccttgaacagctcgacaaccatccctcaaaatgcctatgctgtacgtcacacctccatgctactcgaaaacgaccgaatactgactaataacgcgtccggatcaacgacagcgctgacccttcctccaagtaccggccctacaagccgttccccttcccccagcgacaatggccgacccgggtccaggagaaggctcccatctggctttccactgatcttcgagacggaaaccagagtctcgccaaccgtgagccgcatgcttcgatatgacgatgtcggagacccttggaacaacacggactaacccgacccctgctcgcaacgtcatagccatgaccaactcgcaaaaactccgtttcttccgtcaactcgtcaagctcggattcaaggagatcgaggtctcctacccggcggcgtccgagacggatttccagttcgtacaagacctgatcaacaatggcgagatcccggacgacgtctggatccaggtcttgacccccgctcgatcggacctgatcaagcgcacctttgaggcgttgaaggggtccaagaacgctattgtgcatatgtacaacgcgacgagttgtctcttccgggaagttgtctttaatgccgatcaggccaagacggtcgcgtgagtctgttcgcctgcttcggtgggacgtgaagatcaaagcgttgtagatgcgagggaatactgatccgctttgatgctgctgcagtcttgcaacccagcacacccagctcgtccgggaactcgccgagcagtacgcggctgaggtgagtccatcattcaaccatttgctcgcgttctgctctgtatccagccgtactgacccggaaatcgacctcactttgacgatcgacatagcatggcaccaacttccggttcgaatactctcccgagaccttttcccagaccgaacccgctttcgccgtcgaggtctgtgaggctgtgaaaaagacctggttggcgggaaccaagagcgtgttcgccgatggccggaacgaggagaggatcatctttgtgagtgccgctcgaacaatcgcgctggttccagcaaaaatggctgacgcgaaagtttccgatgtggatctttggttagaacttgcccgccacggtagagattgccacgccaaactgtttcgccgatcaagtagagtacttctgtacccacatcacccagcgagaaaagtgcatcatcagtctgcatacccataacgatcgaggtgagccggttatccgcgacgacgaggcgcaagaccgaagatggactgacaggacatctcctcgactcgtcacgtaggatgcgccgtcgctgctgccgaactcggtgttctcgccggagctgaccgaatcgaagggaccgttctcggaaacggtgaacgtactggaaacgtcgacctcgtcaccctcgccctcaacctctactcgcagggaatcgccccagagctcgacttttccgacatcttctccgtcaccgataccgtgaccgagtgtaccgggctccccgttcaccctagacacccctatgctggagagttggtctttaccgccttttccggatcgcatcaggatgccatcaagaagggtttcgaggcctaccagaagcgggtcacccagggagacgtgcgatgggagttgccttacctccccatcgaccccgccgatatcggatgcacttacgaagccgtcatcagggtcaactcgcagtccggaaagggagggtgagtcgtccaaatgttgaaaactaacacgagagccggtttactgatctttcactcctgatgtcgctcgcagtatcgcatatatcgtcaagcaggccctgcacctcgacctaccaagacgtatgcaaatctcgttttaccagatcatccaggcgatctccgaagctaccggcaaggagctctcggtcgagaacatcaccggcgccctgcggtcgacgtaccacatcggcggtcctgcttacgagggacgtatggtcctccgttctttcaacatgaccaacactcctggaactcctggaagcacccctgcggacggcgagtcgggtgaccgacctcggtacatgaaggcaaaggtttcggtcgacgggatcatccgtactatcgagggtgaaggaaacggtcctctatcgtccttcctgaacgcgctctaccgagctttcggtgtcgagctctcgattcgagaatacacggaacacgccatcggaggtggatctaatgtgcaggccgcttcgtacgtcgagctcatcccccctcaggcggacgaaaaggacaagaccaagggaggcttctggggtatcggagtcgacccggatattactgggtccggtctgcgggccgtcctgagtgccgccaacaacgccatggcaggcaaggaattgaagggtcttgacatcgctccttctgccgccagactgagctagagcgggtccaggaacgaccaacaacctaaacacaaaaagagactctctccttatgcaaagccccgtcgagattatgcattgggtcgcgagacctgaaaacatcattgtattacgatgctacgaccgatatatcaaacattgcgaacggtcggaaatgatggcgcttgacctgttttatcagagctgcagttttggaaccaacattgtgccgttcgatcagaccggactgatcccgtcataagagacagacggatgcggacgagtcgttcgtgtgtctgtccgattgcttctcgttacaatcgccgggaactgcgcggatatgcaggacaggctccaacgtaagcagccaaatcctctacaaaaggattaatatgtatgtttgtcttgaagccaagtgctactcccccttctacagtcacactgggttcctgcccagaaaataatgcccactgccttcggcaaacgtcgccaaagggtttgatgatggacttgatgtcatcaaaggtaaacttgccatacttgcacagcaatctcataaatccgctaggaacggccttcatgatcaaagtctcattcttggcagcctgtctttgttggaaacccgacaggttagggtgatccgaaatatgatgccgagcgatttgaggacgttgtcagaggcagagactcggctgcagaagacgccaatgcaggccgtcaacggaaaattggacgaaggtacttgcatctagcacgtgattctgcacagctcactgagagcgtgcatatcgttagagtgtgacgggggcccactcctccatgattgacttttgcatggactgcggaccacgatcaacgacgcgctgatcccgctgatcatcatgcggggcagaccatgatgacgctccggcggaagatcgtctagcgcgtcaggggtcgagatagagtttatgtttgatcattttgttgtattgtcctgccgctgttgttgtcctgacgttctttatccgatttgttattgtcacgtatggcgtatcttgttgcgtcttcgatttctttttctcaccggccatggctcgcgcttcggcgagaatcatgatcttcgatttcttcttctttccattgtgggggttgaaacgttccataggccgagtgtagcgcgcgcgataaagaagcttgtccgacaggggcttttcaggtggatccactgatcgcggaacactgatgcgaatgacgagctggcgatttgttgatcaaattatcgcccacgagtcactggtctgcgggtttttctaagggtgacgtatgaggtgaaccactggttctcgggatatcgttcaaaggcgatcaccgatcaagccattcccagaattacaacgatgcgattggttagcccggtgttcgcgatgccattacgcaatatccatcagaactaccatcaatcgagatccaattcgggttcgataggggctgcaagatctcctggatcacctgcaatgccagacccctgaatcttgtttttcgcccctttcaatgtgctgttgtccgatggatgatcaacgcgattcgttgtgatcggttggagttcgccgaagtgacgcgcgtggtgggccaaggatgaggggcagcgaggactgatattgtgatcaatttgatgggagatcgcgaggcatgtgcgtactagcaaagatagcggcgggaagagggaagcccgggtcgcgccgagaattgattgttcatgctgcatcacgcgaggtggtgtcaccctgaaaccggactcgtgacttccatcatcatcgggacttggtttgcccacacaaacaaagacaccacgtccagctattggatgacattcctcaaagtgccacttgctcgactcatatcgtttcctaataagcacaaccgtacaacccagatatccagctttgattctgtatctgcgaatagctcgactctctatggaaacaaagagttcctgatcaaaatcgcctggccgcctgggagtttcgcccgaaaagcgacggccccgactgatagtgtaatctcagcgaattcacgttggggaaaagggcgaaattcctccctctgcaaagctcgtcatcactaagcagatataggggttcgagcaccgtcgacatcaccacctctatcatcacggtgcaaggagcaggaagacgagagccaaggaattatcctctacaggattctatcagaaaggcgaaaaaagggagagaatacggcaagaagtcgaagtatgtaaatcatctcgccacgcgatcctcgatcgaccccgtctcatcctgaactgcctctcccctctctaccagcatcgatagacagctgcacacatggccagaaccaaatcccaacgaacggttcaaggagattctacgatgtcaacaagtgaggatcagcaaaacaatgccagtgtggcacgtctactaccagggtcgacgggaaacttatataccgacaacattaactccttcaaaggaccgcatactcgaccacctttggcgagaaaggaccataacatccaaatttccggatcctaccacgtcgatcctgctctcgattacccgtcctcctctacattctccaccatcgctctgcctccgacccacacagctcagacaaacacgccgtacccaacaggacctccttttgatctcggattcaagacgatccgagctctacctcaagtcaacggaagatcttacaccgtccagtgcggcagtcggccctttcaaggaccctttgatcagccgggcaagagggtcctcgggcagtcgcatccgtccacgtacgatttccccctgacgccacccgatcaggtcgataccctcgggaaccacttgggaggccacgctcttcagagacacgctctcttaccgcccatatccctgggattacaggatccaaacgctacgcactctaggaattcatccttgacctcgctcttctcatcagcagactcgacgagccttccaggaatctgcgagctctcgccactcgagcctcaactgtcggaagaccacaacgctcgaagccgggctccatccactcgtcccgctcaaagggactcgacacaagctgccccacgtatcgtcggtacgagcgccgatttgcaacattgtgccgatcgagaaagccatcagcaagggcattcctttgtctcgaaacgtcgattgacccacatttccgacccaggatcttcgactgcctcgcggtctcctgcattccaccacttctacacgaccgcgcctcctctaccagacgttgcaggaccacctttcaaggcgcgatcagataatatgagcgtgttagccatgagaaccgatcccctactttcggacggcgtggttgcatctccctttccgcccaagtgcgatgatcaaccgatacatggggtacaggagcacgacttgaacggatggttaggatcgacacagctatacaccggacacgggtcgattgccggtgtttcaagggagagcgtatcgacttcttccttgagctcgttctcggacgagccgaccaacgcgctcgatgacgagcaatccaaaggacaaagggtagatctggaagctcctttgtctggttataatgggagcgaggagaatgctggtgaagggccgaacgagatgtggtcatatgaccaggccatcaacgctcttctcagttcagcagaatcgatgcaaggtgaacaaaaaggcattcaagcttcctgccaacaacctatcgaccagaatcaaggtcttaccacgcaggggacatcccagatcgactattcgccagccattggacctttgggagccaaagccatgttcgtccatactcctcaggacgagcaacaagggatgaactatccttcgcagatttcggtcaatatggaaaggcctttacccacccctagctctgcagtgcccataggtggcgagcaccttcacaatactcagaaccaggatcaacagcaatacctcgtgcccgtcgttcagcgtggcgaacatctcttctacgatcccgaatatcctatcacgtcggcagcttcctacacctttggagctaacgcccaccagaaccattcctatgtgaacgggtaccaaaagagggatggtcaaggggtaggacgccagaccagcatgaatttcggagatcagaccggatcgagatcggcgcacgaaaacatctcgcagcaaaactttgtcaaccaaattcctcgatcataccacgggtactcgcacgatcagcgcaccgagaatgccatcttgaacggccccatgagcgctttccccggatcgaccggtcagctcccttcggctttggggtctgccttttctcatttcagccacgaaaatcagaataccaacaacctgattataccgacccatcacatccagcctagtcggagccaagacaacttgaatgcggcgcgcacaccatcgagcgcttatcctcaaacgccttcgccccagaagcgaggtgggtccgcgatgtccgcgtcgtttcatcatgcccagctactgagatcggcggctcccgaaccagaaggtccctccgctttcatgatggcgtaccaaggaggttgtaccccccagagtgtcgggcaggggcgtcatcccccatccagtgcaagccggttcgacgagatcaagatggaattgcaagacggatacggcgagacgcccgagtacgagatcgagagaatgcgcaacatccaggccaatgaacagttgatggaaagcctaggtcttggaagcagccccggtgtcccgtcggttcgcactgtaagtgctttcgagcctgatcgaaccgctttcgagatggctcattaatgacattatccggtcgcgcctgtctctcgcgccccagtcccgttctccgtcgaaactggtcaaacgcaagacgtccagcttgaatgtcaaagccaatcctggcgagaaaaagtcccgcttcaagaatcgggttccgtccatgggccctggtgcgtatggcgcgtatcaacgactgtttcctggcgccagcacatcctgaccgtgagcatctcccatagtccgcagctcgacccgcttggcttcgatgtcaagaaatgtatcgtacgccaatctcgacagccacaacgaggacgattccagcgaggcctctttcgactcgaacgatatggatgaacgagaagactcgtgggatggcagcgatagcgagcgaactcacggcaggaggaagaagcgtaatggcggatcccgtcgtcaggcttccggtcggtggcctcaaagtcaatctcgaaacaacgtgaggacatcatgaccctttttagccgtggcctcgagctaagaccctgctcctctcgaacccgcagtgttacagctatcggaatccgactttgcgggatcttgtcgatgaacatcccgatgtccgtactgtcttccctcttttctacaatatcatcaccgaagacatgatcatcaacaatagcaccttccctctgattggatcggttccgacctcatgcaatcctattcagaaggcgggttacctccaggaatactatcacaaaggtcgacgtgccatcgctcagctcgacgcgttcactgctcgatgtgacaagcgttacgacggaccctgtcaacgttggactccgttatccgccgagatgaaaattgcgattcgggatatccgtcgaaaggccgtcgagagatgcgaaaattacaagtatactcgccgggatctgctcaacaagtatgctgcattattcattctgatgccaggggaacaatgagactgatccttatcaatcttaccaggaatctcggcaaaggcaaatgggctgccatcgaggatggctggattagttggagcgttcattcaggatctgcggatcccgctaacgatcttgaggggatcgatctggcttctccacctccggagtccgattctggctctcaggaatctatggcatcgtcccgacgacgagcgttgtcgaggaaacgaagccaggccttcggacgcaaagcttctcgaggtgacatgaaccggaattcatctttgcgtttgcataccaatgatgtctttcaaaacggatactccgacgagcggtctcatgctggggtgggattcccgagcgttccgatgaagcagaacataggggatggcatgtacacaccggtcactcctcaacgtcaacagtcggcgagattcaacccaatgtatacacaaacgccgaaccagtacaccttttcgcctgggtcaattcaggacacgcctttgaatgtggtcaccccgtcgatcatccgagcggcacggttcgcttcgaacaatcctctcgggtcgcctttcgggaccccggcttctgccggagggttccacattcaacaaggtactcctacacatcacttacaccacgcaaacccacaacaattgttcgtgaacactcctgtaggtgaacaggaaacaaccaactcgatcgcctcgcacccgatgtccatggacgaagggatgctcacgggcggagtggagatgtcgtataacatgagcgaggtcacgatacaaccgggcggggaggttacccaagctttcaacgaacaaacctttacgaatgggatataggaaaggctatattcgtccgactgactagggaagacatcggtcgcaggcggttgatggacaagtcacatacgacggatcttttggctttcgatactaccagtttttgtctttgtatactttcaggaactttcaggaagcaccattttgagattactcttacgccgaattccctcgtgttatgtttcaaatcgatagatctcagatgaccacaataatgaatatgaatgtgtactgtagcgatttctgacagggtgaaacaaggagattgtctgagcggacatgcttctcagccaaatgtccgtgtgagcgacatgacgacatcggtcgaccacctcggttcacctacagtatctaaatgtctagatggtaacaacgctctctctcatgacgtatgacatacgttctatcctttgcattacatcaaaggtttcttcaaccaagatgtccgagcttaacgtattcgctacaactttcaacctggcgacacgtgcggctgctctcaccgatggcgagctgcagcaatggttatcgcccatgtggaatcggaaagacggtgtcaaggcagactttgtggtgatcagtatccaggaaatgtcgcctttacatatctccagtacgttatgggggtactgcgccatcactgcctagcgaagctgacatgacaacttcgtcctctcatagtgtccggactttctgtacccctggtagacaagctccgctctcgcttcctcgagactctcaacgattctgcggattcgtccacatactatcatatcgcctcggaatctctctgctcgattggactgtgggtgtttgccgatcagcagtcggttccacggtcgaagttgggcaaggtggtcctgagcacaaccggattcggagccggaggcactggaaacaagggcgccgtcggtgctaggattttgcttgaccgaggtgaggttgaggggaacaatcagtgggaaagctttacgtgagtggatgcgtggtattgagttgcgttccggctcagaaactgatcgtcctgaccgcagcttcgtctcgacacatctggcggcgcacgactatgccatcaagacgagaaacgccaactaccaaacaatgctcacctcgctcatcttccctgccacatccgccctggacgtgccctcccgagtgttcgagacgtctcattgcttcgtcctaggggacctgaactaccgattgagcgacagggccaagaccgtcgagcgtcgggtcgcggggaacgaaaaagaccagcagaagaacccccatcgatgggacgctatcgtcgaaggctccttggtctcgggccagagcggcagaaccgggctggtcgaacagcggaggtcgctcgtcgagatggacaccctcgctgagcagcgcgatcgaaacaagacgatgctcggtctgagagaaggcccattgacttcctttgcaccgacgtacaaacgattgatgggcaaagttgagggttaccatcccaaacgccgaccagggtatacagatcggatcctcttcgccagtcacgatgaccgactaggaggagggtctagcgcaggtgatgacgacgacgatcaaaccagcttgatcgggaaacacgtcgttggaagaacgaaagccttggtttacgactcgattccggagatgatcatctcggatcacaagcccgtgtactcgatcatcaatctgccaacacccctctcggatcgctcgacaccatccatgggctccacgccttaccagaccccgaccttgccgttcccatactcggtgcaacgcgccaccgatccccttgtcctcgccatgtacaacggtgtcggcaggacgaccgatcggatgatagggttcgcgtggtatacgacgttgattcttgggggcgggaaagaggtcgtcgggttggcggtcgaggttgtcttgttgacggtccttctgttctggtggcatggaatttggcctttttgatccgtcgatcggccggcatcggaaaattgtacagagttgtttccgagcgcccaacgaggtattatcgatataatttacgcaaaacatcaagggtttcctaaccaccttcttcctcctatgcgacacgtacaatgaatgcgaggcgctgcatgaaagccgctgcgactccgcctgcctgataagtcaaacgggagtcacggtggctgcggtcgtttacatgtccccttgcaacaacttgacccaatctaaaccgaccgagtccagcttgccgaaaaccgagtccagcttgacgaaagcagagtccagcttgacaaaagccgggccagggaggctggtttgtcgggtcaagttgagttcctcgaaacctacaagagtaagacttagtggcaagtctcaggaacaacaaaatgatcctcctcattctcatgcagcgcaaggttctcgagtgatgggttagaaagtaagggttccaacaacctgtttgacgaagggtaattcccaaagctttgtctagattatggtcgcgagcttgcagcttgaccggtcccgtcatagatcccatgattgtatattgggccttaaacccgaggtcgtgcccagccgtagagctcgcgatcgttcctgcgtattttcgagagcatgagccactccaaggggcaaaatcatcggtagcttcgacctggcctaaggacatcctccttacgaggcacgaaagcacttctactggtatcgacgaggttgatgtcgggcagcttggttgttgctgcgcttgcaccttccgggacagtgcggcaaacccttcttgatggcctatatcatcatatcgtcgattccgtataacatgtttgttctaccatgtgagccaatcccgcttgaaacccatgatagatctcgagacggaggagtccgatatcttgaagccccaagctgacgagggatcctgcgaacatgacttgaccaagccacagctaagccgcccgaagcgcgtgcgtaccatgccatgccatacccagggaatcatgcatagtacgtaaagtgaatggtcacagcgttgttataccgtattataccgaccattgtgtcgttttcgtatgttatttcgtaattcaggacctcgcgctcgcggaaattgtcatgcggacgagccttttcccagtgcgagacattctctacgtctcttgagctctgcgttgatcgcgactggacgacccggacagcgctcccgctcatacgtccttctccaccttgtacaaggctctcgcctgagttttcctggtgacatgaacgttgcatccgctcccaccgccgaacctgaggacgacgttttcgaccgggacctgtgcttttgcctgagtcgacttggtcgccgccaccgccaatgccttcttccgcctctgcacgatgatcctttttgcgaatccgaacctctcctgatcggtcccgagagcggtaaacgaggcgtcctcgaggaggttcttgaagagctcgaacgggagcgcggtaaaggtagcgacgaattcgggattggcagtgagaggcgtttcaggcgtggcgggtgatttgcgggcgaggtcttgcgcgtatccgtgcgtcaagtaggatttcctacggagacgagcgtacaggccatatcagctcgagttgggggcgatccgaggtgctgaatcggcaaattcgactcacacttccgacctcaaccttgctacccaatcgccttgctgcgcctcgtcggtcccgttgacccaagcagggccagccttgaccgagacgtcagagggggtaaccgagccactcctcccgcccgcgctcagacccatagcgctagccagactcccattgatgtaattcgcgatcccaccgaacccgacctcttggctcccctcgtcgcctccggcatccacgtcgtatttcgtacgggaagagacgatctcttgctcctccctcgagtcacaccattcgatccaggaacggacggaatcgacctggatcgacttgcggcagaggtcgtacgcgaggggactcaagtcggggagtccgaggagcatcgaagcgagcaggaccgagcgagcgttggacggggtgatcaggttgacggcaaacggcgctaaatgaatacaagtaggtttccaagcgattagctgatcgtgcgctatgcttgggtgatcggcagacgatcctgcttaccatacatatatccgagacagattgcgatcgcctgtcaccgacgagcaagaacaccaaccgcaagcccgaaaaccgtaagctatcatccctcgcgcatctccgctggggccttccttgtcggtgtctgactcttctcaaaggaagacccaccctgcgaacccagcgagactcacctcatccgtgatctctggatcggttaactgtatgcgtaccggttcgtgaggcgccagacgatccatcgagcgagcaaagtatgaggattgggataggatcactggggacagttaggcatggtttggcatatcccgaagtcagcggtcaaggtcagggcgagtcggggtcgacagtgggaagcttacatcgatgcaggtgataagatcggtccctatatgcaagaaatcgtatcgagtaaagaccaagtctacatgagtttcgagagcttctgccgctagatacccagcacgaggccaattgtttggcgggtatgactcaccggacttgaacttcgaggtcagagtaccgtcctttttgaaatcccgtatcccagatggaagcgcagacgttcatggcatgcaccgtcccaggatcttgtgccatcctggttattgagagagatgacaatgagctgggtctgtcgcaatcgcgggatagataaaaatgcagatgtagtggactcacacgagcccatccctactcgagctcggtgcatcggcttgaccgttctgactgggagcggccgacgagacggcttccgggtaagtgaaaccattcgaatcggatcctgctgctgtcacagtggtagcggggctgtggaacccgttggtttgaggttgcgaggttgacgaggaagaggctacggcgttcatgtcgagctagtcgtagatcgagagtggcgttgtaaaggcgagcggttgctggtagtgttttcgtgttcttttctggctcggcttgtatgttcaggttgaagagtagctcgatctgattgctaggtagtaggtacgtgtcatgtagaggtgatatcaagtggaatggacatgaaccaacaccaacactcttgcttgggtgttttgcttctcacctcgtcgcgaaaccagatttctccgggattttctgaaattcgcgaactcgaaaaacaggaaatcatcatcaaatgacatcgaatactcgactcgatcgcttatcattaacctagtcactccagactgcaaagtatcctttaggaggtcaaggagcttacagtcaacgatctagtccatccacaaaatgtccgtacggtcacccctcaactttatcgcacgatcggggatctcgttcacccgcaccactggtcgagccggtccatcccgactcctctcgacgagtccgactaccgagaaccgtcctacgcctgctcaatccctaggtgacattttcgaagagacctgggggtcgagttcatctgtcggagctggtttgggactctcgagcgctgacaagaaggacgtcaaggcggacctccgagcggccgggttgtcgacctcgatcgcggactcgccgcctctggacagacagagcgttgatggagctcaaggtagagctctctaccgacctggatatgcagctcagactcgaccgcccaggacggaccccttgttggaattgttcaccaacttgttgatgaagcacggtaggaaagccgaggctcaaaagcggattggagaggtcttggatgtcatgtaggtcgcccatcattctcgccatggagtgttcgctctctcgatgaatcctgacactcatgtacaaattcttgaccttaccctcgttccgcaatcacagccgccagaccaccctttccgaccccgttcccttgctgcaccaagccatccacctcacctccccctcgatccgtatcgtctcccttcgacgggccgccaagaacgtccccatcccctcggccctggacgcacgtcaacgtgcgaggacgggaatctcatggatcttgaaggcttcggaaaagggtcgcaagggcggtgcgagcgagaggacgggcaggatcgctaaagaggtcttggccgtcctggacgggtcgagcgcggccctcgctagaaaggacgaggtccatcgatcgggagccgtcaacaggtgggttcaatgacacgggaggagaacgagtcgacgtgtggtagctcatctcggagtttggatcgctgatgcgacccgtcgtcgtttgtcgtttactcatcaggtccaacctcaatacccgatgagaatgggttcagcaacgaacgcggtcgaagattgtacattccatctatcaccaccgtcagagagaaaacgatgccacaaacactatgttcttcctcggtgatcccaaagtcgaaagcctacagaccgaaccgattcgtcctgcgaatgcctctgcgtgttggcttgttgaccctgtgcgtcgccatgggtcgcaacgtgcgatgattctcacgtccttgacctttgcgagctatgatcgctgtcgacctgcctttgaaggctccttattgcaaatgtcgacggtaaggctcgcggttgatatacccaggtcggtgtcgatgctattgcgcatccgttccgctatacctcggctggtgttcaatgtggcccgatcgacgatcaatgcgaggccgtgaagctagggtctctgagcgtccagaagagcgattgcggcgaaaggtggttcaaagcgctgattgcatcaccccgaacatgccagatttgaggtatgggcaaagatcccacgctgatctgctgcccaggctaggtctccacctagtgttccaatctggcttttcatcgcccgctagtctaccagctgggctccgaaatttggcaggctccttcagctctctgagaaaaggatagcaatgtgctttgttttgcaaatattcctcaaagattgaaaatcaagagtcatccacgtcacatctgcgaaatgcaagcaccccttacttccactcctccaccatgtacttaccgagcttgccaggcaagcatcccacgatgcattattcaattaggtcacgattcactctagcatggtccagaaatttcaaggcgatcgtgtatgcgagtcatgaaatatgcgagaacgggtacaccaagggtagaaacaatctcaagcacaaaagagagagagatatcgtcggaatctacggaaccggcgctactccacggaccgagaacatttctttcatctatagagggggtcgagagttgggaaagaagagtccatatgtcggtatcggctcaagtagcaaatgtccacaaagcgtccgggttcgcaacgatcaggagccgaggtctcaggcgtagaatcgtccaaaggggcgagcagtatattgcagtcgtcaaatagaaaccaggggtgggcaggtttgcttttgcgcgttcgttaaaagtttcggaaatatgggcgtgatcatggttgatggctcgtttcaattcaatagtaacggttttgctgcgcaggagcctgaaaaggtgaacgtggggatagttagtgtcaggtgtgacgacatttcgaataccgtattactcactgctgcaccaggaggtagaccggcgctaccgccgctgggaggtgaagcaaagccgtatccctgggaagagcttcgtttgggtcccttggcgactctcctcacgccggaagagtgcgagtcggccgacgaaccgatcggaccgttgtctaccagtgatatccttcggtagtgcgaagggttctgctgaacgggcggaggcgaacgggatgcctgacctcggtagccgtcatctgttcgttcgaatcatcagcttcaagatctcgatgggtacagctgagcgggttcagacgacttaccatcaggataccgttggctagccgtcataccggtgcgaggggggaaagactcgtccataggtgaagcagggccatagttcgagctgagaatgggcgcgctctcgtctcggacatcgccagagtacgacctgtacctctcggcatagtgatcagccggttctgacgaggccggagatgaatctcgacctccacggaagggtccacgaggaggagcgggagatgcgtccagctggggttggtactgctcgcccggcgatccttgcacgctcatcgaggcgtagctctgactgggtcgacccaaaaaggccgcttcggatccagcaaagttgctaaagttggtctcgtgtgtggaagccaccgagtaacgatctcgagtcataccgccctcgctgcagtcatcgataaggaataacgggtcagctttgcgttaacgtgtggctaggaaaatattactcaccgaccggcggtcctgtgaatgacgtccgagtacgagtcgcgcgactgttgaccgttcttccaacgacgttctcgctcaaactcgacccatcgcttcatcacgatgtgagacgagtcaaagacaccgtccttgtcaccgtggcccttttcggcgctttctccctcgatctttcgcgtctctccccaactaaagtcgtcaaagtgccagaaagcgtaggccggcagcacaaagttccaaatcggaagcgacaacaggtagatgcccatccacccaacgtagacaaactttcgcgaggtgatgacgatcaacagaccgggtagacccaaaatgaaagccaacaggatgagcgacaagatgggcttgacggttccaggaatgatggcgacaatgatgaggtagatggtgaacgagatggcggcgggcaagaccaaggtaccgatgagttccattccgacgacgaattgcatggagaagcagaacgttccacagaggtcccggacgagcacgagttcgaacaagttgtggacagtcgagttgatccatcgtcgacgttgagagagaagtactcggaacgtgtcgggtacgaccgtcttgcagacagcttgagggcaaaagaccatttttcgcttggggaacgtcttgagcatcagcgtggtcaggtaacgatcctctccgagcaagagcaagttcttcttgtgcagagtgtcgacaatattctcggcgtaatgctcgcaaatgtccgggttggcgaggatgggaacccagtaaccggtctcacccttgggcgccttgatacggtagatactgaagcatccaggaagacaggtcacacctccaaacatcgattcaaaggccttggtcaagtgatgagagatgtaatactcgaagactgcgttcaagaccaatgtcagttttggaatcgctgtggcttgcatggacagggacggatcactcaccttgaatcatggtcacccaggtctcggtcttgttggcaatcttggtctctccgcagagacccatgatttcgggatcgtgtaccatgcaggcgttcatcctggtcaaagagtccgggaagaccttggtatcggcgtcgacacacaacaccgtctcgtaccgatccggactgacgcccgtgacccgccagagcgcgttgaagaattcatagtcgaacgtggtcattcgctcgtcaaacatgaccttttgcaagaacgacatgaggacgatctgcgagtcacgttttcctcggttaccgggcttggcttcgttgacctcgagcgggtttccgaccttggcgacgagcacgatgggaaccttttgctgtttggacagctcgaccgtgttgttgtcgtaatcatagtaacctgcatagaccttggccatgttgtgtcgcttgtgaccatcggcgatggcgacatacgaatgggcctcgacttcgtgttcggggacgacgagatccttcatcatgccgagcacgatatcgggcgtggtcaacttggatccggatcccttgaccataccgtcgcaaatgaccaggatgaccttgtgactgttgggataatccgtggtggccaacgagtcgatggtggtccgaagaccttcgatcgattccgaataggcggtgacgagacagatgctctggacgagcgggaaaccgaacggttcgtagtcgaccggaggctgggggatgatatcgccgagagggaacgggcatccgctcgatccgccggcggtatctgccaacgacatgcccgactcgtcccggccaaaggcgagcgaggtcgagctcctggacgaacgcaacatgggagatccgggcggggtgaccttggagagcttgccaccgtacgtgctcgcctgtctgggcctgtagctattgtcgttgacctgaccgtaagcggtcccaggacgagagtttccgacgacaaggtgatcggctcgactgaaacgactggtggtgggcaagaacctgccctttttgggcgccttttcacctccagcagcggcgttgggtcggtaccgactaggggccgggcgatagatatcatccgtccagttttcaatctcggccgcacgtgccatacgctgcgtgtacgtctcctgcttgaagtttccgagcctccacgagaggaaccaaccaaaggcgacggccatggcaaacttgatgagcacgactccgaggataaagatgagcgacaagtagagcaagacgtccgaagcgacacatccgatcgatttgacgtcgatgaatccgaccctgatcgtgtcgaccatgcatttggcaacgtccttcatgccgccgcggtacatgtgcatggtaatgtccttgccctggtacgtcgcgttgggcgtcttgatctggtcaaagatggccgggtatcgcacttgactaggttcgagccattgcaagaggttcagatcgaggaccgagctgtcaaggcaaaatgcgggtcagcgatcgagatcgagagggactaacccggcacattcgacgcgcagggcttacttttcgtagacgaccaaattcctggtttcattcttgacttggtgccacttgtagtagacctgtccggcggccttttcggcatagaaagaatccctcgcggcggccgaggtatgacaattggtagccgcctcgtacccggtaatgttcttcggagtgatccccgcctgatcgtgcaagttgcaaggaaagtaccaacccagcctgccgtccgaagcctggttgatcgcgctcccgggagcggcggtgatcaatcctcgacaattctcgttgacccgctgaaacaagaaactggcgtccttgcctcctgcctgccaagcgtccgagaacaatgggttcgtgctcccgttgaacgatgcaccggcggcggggtgagaccagttggcgaattcgtaagcgtacccgttgatgatcaggtacccctcgttggcttctccggccttgatccggagaccctcggcaccgcaaacggcctgggtgaaaccaaaggtgacgaaaccgacgacgcccatcaagatcaagacgagcgagacgagtccaatcttttccctccaggctcgttgagcttcacgggtatgtttgcctgcgacgcaagaaaaaatgcgcggtgcgttgcgggtcaggacaagagctcgtgacgatcgaaccgccgaaccgcggactcaccaaacacgccacggaggacgaacccgggcacgcagaccgtcaataggtaacaatacaccatccacgcgtccttgggccccggggcgaaatcacccagacatcccaacttttcctgctttgtataattcgtcgcgctcctccctgcacccgacccggtcgtcgcgccattcggaggtcccgccgccgtgcgacccgtgacgttctgactagactttctgcgcaaggtcgctcccctcttgaagatattcaaccctgattcttgtgaatccgtgggttccctcgcgaggagggatctcccacgtcggagccctggaggcgcgttccccgtcgtactgggcaagacggccatcccaccatgtccaccggccatcggtccgttcccgcccatcccgttcccccccgcacctgcacctccggcgtactgttcgttggcgatggcgtgttcccgataatggtacaatcgatggttcgggtcgatccgctctctatcgggcttgaccagcgatttcttcctcctcacgtcgctcgccccgccacccaatccaccggaatgaccgatcccgagcatccccccgagtccacctccagacggggtggaagccggtccgtaactgttgggtgcggtaccttgtccttggctgtgatgataacccagatgaggttcctgcgagtaccctcctgccgaggaattagacggatgactcgtaaacttgggaggaaccggtgggatccccttgttatccttggacgacatgtccgtgttctgtctcacggcggcatgacggggatgttgtgtttcctggaagctgacgttgttacccggtcgagaggtcgtacggacgggttgaagacgatcctcgcccgacgtcgcagagggatcggcgtaggggtctcgtgggtaagacatggtgttcagtgtaggaagttgttcagagtgctgtgtgtgtgtgtgcgtgatcttgatcgagtgtgtgtgaagggcgtcaaaagcgtgtcgatccggaagatgcgatgcgataggttgaagatgagatgaagtgtgatgtgatgatcggggaagaagcgtagcgagcgtgaggggggaacaaaaaggtgtatatcaccaagagttaccgaatggtgttatcacaagtcgtccaaggtcgaacctcggtcctagtcgagatcacgatcgacttgtgggcagtgtggcgggattcggcgtggtagatgggtgaacagaacagggatcctctgtgtcaaagggtcttgttcgacgggcgacctggcgaggcgtaataaccgcgatgacttggggggtggtggaaaaagagtgaaaggctcgttgcttgattaccgagtcgacatccgtgcgtccaggtgttcgtcttccgagaagaggtgcaagttgttgatcacgaggagaaggacgtttgctaattcgtcgctgtcgtcgtcgtcgttgtcttggccgtctatgaaaggagaccgctcgcactcggggatttgtttttacgatggcgattggcgagatgcgcgtgcgacctcgcggaatgcttcgtccgctagctactgggccgatttcgttgacgctggagggtatgaccacggcagatgtttgagggattcgaggtagcctctggcctgggactatcctgcaagaggtgttggtcgggatcagggatggttcgaggtcgttgagtgcatgagtgggtggtttgctgcggcaaaggaaggaagaggctgatgtgattccaaagattggctcgaggcagaagagacagggaaggggtatgcgatgggctggtcctctgtctcgcgctgccgaatctttctcgaccttgccctctgcccctgccctggcctgctgtgatggatgtgaattgtgattgagatgtttgatgtgcatggcgccgtcgccgtcgtccccgcctctcctgccgccctgccctcctctgcctcgcacgcgtttcccgattctcctcattcccctgccgtgcccccggccgcgtcaaaaacagagaaaaatgtcaacacacgagcagcacacacaacgatcaacgcggcacaacgcagaggaaaaacaaaaactccgtcacagcctcggggacctccactcccccgcgttcccccctaagacgccagacgtcgaccagcccagctactgttcatgatcacctagcgatcccagcgatcgactcgacccagactgccaagatgaagcgtgtcccctcgagaacacaccctcgccctgctctcgtcatgcaccacgatcatccccatcgaccgagttttgcaaagactagaaaggaaaacggggaggggggaggaaccgacgaaataaggagaaaaaatggcccaggtcccggccgccccatctctgcccccgcgctcatcctcttcgtcccctgctttgagctgacgctcgccccgttttcatctaaatgtcccgcgtgaacggtactttgtttacgtacaacagggacggaatcggaacctcccctcctccctcgcgggccttggccatctctctccgacaacctggtcaaattccccgatcctgcagcgcaagccaccgcgctcatccgtagaagggaaccaccacttcggttgcaaggaccccgaccgccggctcgggtcgtgtttcatcccatcaaaacaagatgagatggatcgcaggtcgtcaatgcgccatgcgtttgagaggaagttctaaccggatcgaggctcgtcatcgtcatcctcttcccgacatcgtcaccatcgtcacccgtcgttgtcacgtcacatcccgctaaatcccccgacagtgatcaagcatttcacatgtggccaacatcatccaccacccaccttgtaccatctaccgtgtacccttgcccgtttctgtcgagttttagtgtcccctcgcccttcctgtagcagtcgatcggtcaatcccaagttggctatctcatgaaaagctgcgacgtatgcgggtcccggtcttcaactcggtttaccgtcacccggtttagcatccccgagtaatcagtagtcgagtcgagtcgtgcatctcttccgggggatgccaagctgatgttccagactgcatcgaggcggatgtgcacgaccggggagtaatcagtgttcagtttggattcagaggtttcgagcgtgttttggtgtacgaaggatattccagtctctatgcaggtccggcggatttgtcgtaagcaagtgcggcgcaggtctgtttggacaagtctaggaaccgtactctaagagaagaggcttctcacagccggaccgaatgcaaggctcgttcatcctctgataccaactgccatcatccctgctgtccgagccctgctagagtgtctatcgcatgttcatcactgcactaatagtacaaggacaagtcttatcggattgtcaagactgtcagaccgtatttcgcccatgctatcgccacagaaaccctcccgatcatccgcaatcgatgtaacacacgatgacaggagcattaggctcgagaacgccgctcggaaacgagggtaccgctacggtcgctgagaggcttcaggtcgattcaaatttcagtaaatcatcccggacagattgccgagccgggaagatctccacaaggtatcgcctctaatacattcgaccgcggtgaggtttttccagacggggtcgtcatcgactcggtaccgtacgtgtttccatcgcatcacatcgatacaaagtcgatcaccgggacgagcgctaaacgaggtcccaatcgtccccgcctagatcgccttctgcgcatttcgtctcgttggctcttgcgtcgcgattactaaacacctcggtcgccttgtcgaccaagcggctaaagctgaaaggtaaggggatgtacgagatggtcggttggccggatggagggagtcgtgcaggatccgggggtgtcgtcggtatcgaaagggtatgcgacaagctgtcaagacggaatgagaagcgttggtcatgatgttgtcgacttgtcgagcgtgtcagcatgtactgaccctcctaatgtttccgattccactgactcccatatcagcctcaacgggttcaacaccctgtcccaatctacttcgtctcctcccctatcggctagatcaaccccgttcatccacgctagacaagcgacgtcatagcacaacatggcataggccaggatcatctgatcctctttgacctggtacttgtctcgcttcgcctgcttttccgacttgacggcatcttccccttcacctagtggaggcgaacctcgaggggctggaccttctcggtcgatagacttggtcttctcacgaggttgtacggaagttgagaccggaggctgaagcaggctctgccgtcgtttccacttttcccgactggtactgacgtacaagaccgccttcttcctccacaatctcaagtcctcgtcgtccgcccagtcgggcgagtcttgttcgtcagacccgacgttttgaccgtgatcagactcgtcgtcatcttcgaacaccgcgtcgtcatccgaggtcacgcgctttaccggatgctcggctctcgtttcccctctgtcgacccgtctgagcggtacagatcttccgaaagccagcgattccccggctgtaaagaccggtttgcctatcatcctccctgcctctgacgcaggatacacctcgaacccgagctttgaggtggatgcggctggtccggcaggagaatccgaccaagcccaggtgaaaggtaaccggatggtcaggtacagcgagaggaggtgcagcaagtgaagggtatgggagaggacggcgtttaggtggttcgacgagttgcctagcgaagcatacaacgtaagcgaccgttgaacttggtgtatttgacgatatcgcccgagagagaaggaatgcagccgtgacttgcctgtgaatcgagcaggggaagggaacctcaaccccgcgatttccatctccctctccgtccctacctccattcccacttgctcgtcccgactctcgtcagtacccgactttcggccattcagatccacatctcttgatgctcttccttgtcgagtacaagccctgactccaaagacgccgacgacctctttcgccaagactttcctcgctctccgaatctcgagccgagtaagctcgtctcgcctgcccagtcgatccagctcgagctcgaccgcatgggctctaacgtccacttccgaccctggatcgtaatccgtccttgctcgcagatccgacgacatcccgacctcggccctagatcgcgcatcgacggctctcaacgcctctttcctccgccttgcggctttccaacggatttccacctctgctcgcttctcctcgttccccgctcgtatccttccgacttccacttccagggattcgtggacgttggagagccgggagttggtagcggagagagcgaggagatgggtgtagcctatgacttgtcgctgtggttgtaagccggggttcaatgagcccgagtggggaggtctcgtcgaatgtagggtatgcggcgaatggatggacgacgcagaggaggtatggagggggccctgagagagaaaggacgataggcgtaggggagtccttgtgggtcggatggtggacgtcgatttcagggtcgaggacggggtggaggatcctgttgatgcaggcacggacgtcgtcgccgaggcggccgagagcccagatcccgaacctgcagcagagtacgatgtcgacgtggacgccgacgtggacgttgaagggagatggccgtaaaggatcttctcacacctgttcttggaagcgagcagttgtgtctggaggatatgatgagcttcggcatgattgttcagcctatccttgacgacgacgatgacgaattcagcctctgtcgagtcgagccggtactcccgttcgtcatgacggtctactcacccttctcccaggcatcgtggacaatagagatcgtttgtagagctacatccggaacattgcatcatggtggcatggccagtgtacctgggatcatccggtcgtttccatcatacgacttgatcatgtcgacaatcgaggctttgatgtagcgttcttctgagggtcttgagtgttgaccggaaggtgatttacatccgatgtcatctgaatttacttccgatgataacgattgttcggaagtaaatccgcggatatggtcatccccctcccaactcaatcgcttgcattgacctggctttgggcggccgagagcgatcgaggtaacgaagggtgagtagagtgaccatcatcatcatcatcaaccaccacgatcatcatcatccatacgtgttcaacatcacgaggtacacacgggctcccgtctcgttcattcactctccattctcctcgagtgttcgttatcgctgccatctcccgatcgaccccctggtctggtcatccctttcagtccgctgcccgcgcaaaggccgtgtgatcctcgacccgcgaacgaccaccgacctttcgacatacactgccctacctcgcctttgatacgactgtcagattgaacccaccctggaccgagcatcaagcacacactatcaacaacaggagtcattcgaaaacagagtcagacatggtgccgcatctccacagctcgacgaccactccggccaagtcgtcgcactacacgcaagcgctctcgggcgcgctcgtcggcggggcatggggggagaaacaacccgtgaggcagcccaacgggtccagcttgttggattggaacgaggggatcagaaaatgggggaaacataccggtggaggtgagtcccggacgacgagatcgtgtggccatcgagacggttggtagctccgcggttgggttgattgacggtgcgatccttggggacagatacggcttacctggatttgttgaggaacgtctcattgtcgtatcattcttcccgagcggccggcgtcccatccgaccaatcacccggagcttcctcttctactcctcaaaatgtagacacgcaccctactgccagacccatcactacggatccgacgacgaccgcgcggacgaccacctcggtacccccatcttccgcctcggaccaatcgagggaaacttcccactcgttcatctctgtccctcgttcccagagtgaatccgaacggacgtcggggagtagctacgtccacgtctctggggaaggagcaggaggcggctcgggatcgggattggctcctcccatcatcgggatcactccttcctcatcgcacgatcatcatccggaagagctgtccacaggacacatggggagcggaagccctgggatgacgacctcgacctcgatgcccggcaggaacgtggtagaggactcggcttcagcatcgaccatcatgccttcccccggattgacctcgcaagcgcaaccggtcggctctggcgctggttctggccccgatgtaggcaccacgagtcgtccgagtcaagacggcgcgggacaggtgacaggtccgttcagtcggaatttgatccccgacgaatcagcgggtcaggtcatcgctccacaaccacaaccttcgctcgtacaacctggagaacagacgcaaggaccggcctcctcacagacgacgcaacaagcaagaccgacgacctcctttcctgctcaggggtcgatggagtatctctcgcccggctggttggacggagacgatagcgaacaggatatcctctccggtgcaatacgctccgggtcgagggagggcgagttactcggtgacctgaagagggttgagcagggtgtgacgggacgacaaggcggacccgtactaggtcgggtgagtcggatgtcggtcctggactcgatgtctttcgtgcagagctgatccctcgtcaatgacaggcctacctcttattgttggcctactaccaacacgctcttggcgaccacgcagcgtccatcgggacgtacgagcgagtgaattggggaggagagatggataccacgggtcacgaaatgggattgagtttgatggcacagagagtggattggttgcgcgggatcgtcgtctttggtcagtgttcccccagtcagccacgcgtttcagctcatgacgtccagctaacgacaaacgagtggtatcttggcgatcgcgttcaacaggcctgaacttggaggcggtcggtcgagttcaggatgcactcgaccggtacatcaaggcgatcaagatgtttgccgatataccgggcctcactctgcccctcaccgaaacgttcctcgtggcccctccggcaacaacacaggggctgacaggcgccaaggtgctccctaccccggctcgatcacaatcgactcggtcagccccgacgttcggatcccatcgcgaagctcaccgatgggtctcgaccgcactgacacgggcggccgtcatctcggcacgtacgacagacctggaaaggacgctcaagctgactcggacataccacgttatcagcaagatgtggcccacctcgttcaggccgcaccaacaggcgttcatgctcagcctctaccttcgaaccctgcacgccgcctgcagaccctcgaacaaagcacatcaagacggcacggaatggctcgtctgcgagattcccaattcagtcgggtcccagatcaagggtagtcgatcccagctctggtctcgggaatggctcgaggcgatcagggaaggcaaacggttgttgagcgagacgacgtcgtttccacgagcgggagagaccaattggaaggtccggcgattcatcgagagctgcgttgggatctgggagagatccggctgcggggtcgcttcgggcaaggagctcgtcaagatcctctggtgggcgatcgagatgacgttccactcgcaggccgtcctacgacaccttatgaggctgctcttcgtcaccggtcaacacgacgactccagacgggtattcgaactctacgtcaagcttgtcctcaaggcacgacagaccgctcagccagaggagtcgctccagctgcgcaagaccactaccagggaagagccgtcgattcctaaccaggtcgaggcggatgacgtgtatcaagctgatgtggaagagcaactcgccgagagtgagacggaccgcgacgtcgactttctcgaggcactactcctgggctgcagattgttcacacagaaactcgccaaccccgctgaagcttggaggtatgtgttgctcgccggcgacgtcatcactgtcggcaaacgtcatatagccaaggcgttcgctgccaaggtcgaagagagcaagggaatcatccggatggccatggccgttgaggatggggacccacgaagccgaccaatgttgcaggcacagggactagcacacctagtcgccgcgactcaacttgcaacctccaactcggccgtccgctaccatcttgcatatgcgcgcgccgaggctagggatattgccggagcgttggatgcgattcgggaggcgctggagcttgcaccgagtaacgtcgaggcgtggcatctgctcgccttgcttttgacggcgagcaaagattggtcgggagcgttcaaagccacccaggcgggcatcgacacgtgggagactgtcgagcgccaattggctagatctcagccggtcgaatacgtcggtccgaacgatgtggtgccattcggtgtctcgactagagattacgctgcggaagacgatgcggagggcgattcatacaattctgcgcacgagcatcaaagcgttattgtcgaccgatcggtcctgccactcgccaacagctctatcgcttcgtcgccacctccagcaactgcagcgacccgacttgctaatgtcatccagcttcgtatgactcaggctgtcattgtagagaagttacatggaccggacgaggccatgatacgtcaacaggagacattcgcctacttctcgagccgcactggctactcgagacccggtggtcatcagtcagacggtagtgctgatgatgtgagcgtacgcaatctcggggaaagctacgtgtctgtaaacgacgcgaggcccgccggtctcagcgagatggccgaatccaccttctgtaagttaccggtggatgtttccacattcaccaaaatcctggcttatttcccgagctcgatgacagtatctccagcaagccagagacagggagataaccctttatccagagcctcgacgcaaaatacgactggttaccgtgtgagctccgcgccaccgtctgaagacgaggccgagacaaaaagcctgtccgggcgaaagcaacgtttcctggggcgccatctccatggcacaggagccagaaaaggcaaccatcgatctacagctggtacaggacgacgtccgaccggtatgtggcgcacagggcgatccaggttatccagtgttaacgagtaacatgatctttcccccttagacatggcttcgaacgagaatcgaccacgatcagtatcaaatggcgcttccgtccggtcccgaggcaccacaccggctcattcccactaccacggtgcaagacctgcaccacctccacctccgcctatcaacctgccttcagcaccacctactggcaggaatgctgcagaaacacgattacttgcggatctttggttacagtcggctgcgacgttccgcagaagcgggaagattgaacaagctcttggcgctattcaagaagccgaggtcatggacccctcaaaccctgaggtttgggtgcaggtgagcgcggattttgcgtgttcagcgagcaataatcgcagactgatccggtaccctgtatgattttcatagctcggttggtattactcgatcattggtagtcaggagctggccctgcaggccactggcaaagctctcgtattatcgccggaatatgctcctgccgttgtccgaatggctgaactgtacatgggtcgagatcagcctgatctcgcgcacggattgcttaacccactcacacagggaaggggctgggacgctgccgaggcatggtatcagctcggcaaggtctgccaggcacaaggcggccgtgacgagcggacgaaagaatgcctgttgttcgcgctcagactcgaaaagggtcgtctctgtcgtcctttggttcacgttgtcgatagatgggtttgatggttttgagcaacttaacgaagaatatctgacagggggaagcgtatgacttgcgcaggatttgtttattattataccttacaacttgtacaacgggatatagctatgtgtcaacgcataaaagtcttcacctatcgcgccgtcctgaacatggtacctcgacaattgggagctttgctacgacgcaacaatatcgtgattcctttagtactggtagatttgaagccgttctatgcttgggctcaccaataacatgccgtaggcagatcggtcgtcgtatcaacgtgcacgctgcccgtgtgaggatcctgcagtttcccgtccttgccttttccgcggggagttcgcaacgacatgttggtaccagattgggagctgctctccatcaaatcgccttcgacttctccaacatatgtgatcgtgagctcttgaccagccggaatgtctcttttagcggtgatgcataacctgtgtcctttacgagttagtggatcgttcaagccacataatatagaggagctagctgacttgggctttctcacgtcgaagtcctgtaaaaggagattgatcagcacctcagctgcgttgtctttagctttcgaacccacatcgaaataagcagaacccatggccagatttggatcgcaagagtgattctgcgtatcggaggctcagtgcggtaaagaaaacaaatgggttgcgagtgcttacgagatatcgggtaaactacaaaatgacagagagtaagtcttcggcctggtatcgtttgccgtccattactcacgttctgtcaaatcgttgtagccagcgttcgccccggatgaatggcaactatcagacccagaaagatactacgactggactgaaagcgatcacttacaccccaatggaaagcatccacggtgtagaacgaagtcagagccaaatcttcctcgccatttatactgatcacatctcctgcttcgctgtcttgcgtttcttgtaataatctggcggcttctgctgctgcagccgctccttctggatcgatttcctctagatcggcagggggttgcgaaatgtgccaatggtccaggtcgaataggtatctgtcccgagacatatcagccacatcagacacgacggaagcgtcacctttggctgaaagatcaactcacgttcgacccactgcgttgtaaatccgccctcttgcgtcagtttctgcttcagggaccagctctccgctataaatcccgatgaaggtcccttgtcggatggcagactttgttttgacacctacgatcgaagttgtagtcagtacatgaaggcaggcagtctgagtgatttcggaaacctaccccagcctttttgtctctgtatcatgatcgacaaacgagagacatcaaccaataattcgtcgttgggtcgataaatctggcgtgactcaccgtttcaaagagttctagctgaattttagggtctctgcctctttgcatggactagagcgactaatgtcagacatcggccgagccttgtacaagagggaacttacccggtttcggcaagacggcgggcaaccgcattcatccgaacattcccaagtagggtattgcggatccttgatcctaccgtctctgtcaaaagcaagacgagataaggtctgggctttgaaagcgctggtgcgatgactcactcgtagcatccgaatccagtatatggttcagaaccctcgtacacgatgcttgcgaagtacttctcctgacgcttcaaacaaaagcaatcgctattttcgcggcatggtccgatacatgcgcaaccctttgacttcatcttgggagcgaccgtttccccataaaacatctcgttggagtaaacgaattccgctggaggcgcccgagccatcgtgctgccctttcggaagatgcccggcgcaatcgtaatatctcggccttgatccgtcaggctggcctgactgatgtacgcctccataatcgttcgtaccagctcagtctgggattcctccttggagagtacgttcagctgtgtcaacagcggatccccgaaacgctcaaaagaaagtccttgaagcagtgtgcgggtatcgcatggatgtccaacaatcgctgccttctgacttgatttcagggaagcagatgcgctttgcaccgtggcgagggcatttctagcctgtgaaaccttcatagtctcgctggcctttgctttatcgctgattgcgtgagcggtgctagtcgagggatcttcctgcgcaggagacggatcttcagccagcaactggtccacaatgttcagagccaagtctccgcccaattgtgactcccaccgagtcagtcgctcgtcagtggtcaaggcaaatggcggtggggatccggctctgattgctccgcgagtcaccttcctttcttgcaaggttacctccgtatccgccctagctacatttcccgcaagggccgttcttgcgagatttgaggtggaatcgcggaccgtgcgcgacgtagcccgcctggttacgatcacgtcatcggattctgcgctagatggagctgggcttgttgcctgactagcggtccgaatcttgacacttgcttgcggaccaccttgaatcgttgctttcgtaccttcagcggtcgcagcactggttccaatcatctcatttggaacctcaacaatctgcaaagactcttccgaattcggagcgggaggaacgctgccctgatgtacgtcggtctcgcctgcctcaacttccgctttgactgcagccaccttgtcgacttgcaggttggccagcggtacctgctcacagcctgcgcgggaggtcgctttaggctcgatttccattgcggcaggaagatccttcttgctaccagactgcccgatttcatgctctagacttgtcacgaccgggatatcgaccgccgattgttcaagcgtcgaggtgtctgtggtgatcgtatggccttcgggcaagagggagacatgttcttgttccttggatcgctcatccaccgcttgcggtgaggcatgcgagactgattcttgagcggaagatcgcaacgacggttccggcgatttctgcgttgcggcagacgtcccaggtacgaccgtctcaacaccagtcattggcgaatccacctgcatttcgaataattctggctccagctgaattgcttccggacttggggaaggagtcaattctacctgcatgtcgtcgcctgcaggagaagcaggatacacgggcggctccggcgttgaggagtaagacggtcggaagccccgaggtcccatcgattttcgggcaaaattggactttccctcacgtgcaggagaagcaggatgcatgggcggctccggctttgaggggggagacggccggaagtccttaggtggaggtagtgtgggcaactgtccctgagctcgaggaggtcccatcgatttccgggcacatttcgaattgcctcggatagacttagccccacggtggtgctcgacagatgtctgctctgcctctttcacaattgccgcagtagtgtcatctttgggcggcccttgccgcactgaacccgaaccacccgattcgaccgtcgaaggcgcaccagactcgtcgtcgtcgcttgtatcaccgatcgtcctccagaacggtcgatctttgattcggactggggagaccactgcaggccggcgctcttcactgatcgccctctgcgagctgggcgatcctggagcccaagcagggttagcgccgaaaccgcctggagggtggactccaggcttgatgtatttcgaaggcttggtcttgaagatgctcaggttggctacaggtctgaggggtgcttgtgggatcaccgaggggggtagatcttccacttgagaaggaggtaggaacggcatttgaactgcgtcgtacgggtcttccacaggtacacgttgtctggggatcctcggtttcgttcgttgggatccaggctgagcgattgacgagctcggaagtgatggtgttgcgtcatgcacacgctgcggtcgaagagcaggcggtagttcccgcgattggggctgtttccctttatcccgagccggtcgaaccggtgaagcaggtccgggctgaacgaactctgctcgtgcgggtagaggactttctacagaatccgtcgaagtgttgaccggatccacatcctgaaccgataacgtcgacggagcggtcgcggtggctcgggatccacgcaccgcttggttggatgcagatacatcagattcctctgcgaccccagagtttgcgtttgaagcggttgccgtgacgatttccgcgctctttgacctccccgatcctgcggctgaaagatcctggtcgacccgagtctcttcatacgtccccccttcggacgcaagtgcctcgtatgagccgaacacgccgagaggggcactagcactggcctgtgcgaatctcatcaatgacctgtaatcatagccaacccgcccggccgaaggcgtagaggctttgtccgggactctgtccagcaccgactgcggcaaactatcgagtatagcgaaatctgaggggtttgtccgtataccgagagagataagcgattgatagtcaaacgttcggaattggctttagaactcaccttcgtcatcatcctcgagcgagatgattgccgacttttgctctacgtcatcatcataaggacatgtgtcagctggtcgtatacgggggatgaacaaccagttcagactcactcttgaattccctgctccccgaagcctcgggcgaagagggtggggtcggggacgcgaacagaggtgtcttgcgtttcctcacctccccctcggcttgacctgggttttggctcgagtcgaacaggaggaccacttcttcgtcatcctcgaggttgatggctaagcgatcatcaaaggggcggtcggataacgctctataacatcgtgaggatggagggctaacctagagacatggcatgaacccggcttagctcgagagctcgtctacttcccgatatcggccaagcaggtcccggtcagacggtccggggctggtttgagcctgtcttttcgcaaattcgcttcgatgtttcagcaagactacgttcatgagctctataggcttcactagttagaattgaggtgttattgaccgcatctaattgagtaaaggtcaaatgcaagtgatcaagtgatagttgtcccaatctagcttggtctctgtttccctttcgcgtctgaccgagatcgctggacgaggacggggacaggctagggcttttccactcttaccctactcggtaccaagtactattacaccttgacatcatctcaccatcctagaaagaccttgtacatattgcaaagagtgacatacgactacgatcgattcttgatatcccgcgaaaactcgactcgacgaaacaccccgctctgacctcacctctgcaagaccttttgacttggatcagctacccgcaagatggaccaggaagaggaggtcgaggcatccatcttgccacccagctcacctcacatcgtgcctgctaaacggaaaaggcattcaaaggcttctaccatgccgtcggtcgtcgagggtgaggatgctgctgctgccgctgccgctgctccgggcaagccaaagaagaaacgagccaagacgatcaaggggtcggacgtacccgccactggtgccgtcgatgcaaacagtctgagaaaagagcagcttgacgctagaacggatgttcaggacgatacagaaacaagcgtggtcatggctggtcccaagaccattcgtatcaagcgacccaagaggcctgtcgagactgtgacaaccacggaaatgattatggacgagctggaggatgaacggcgggtgccggtgggaagctcggagcgagctggcaagagcaggagtcgccggatgagccatgacagctgggggactcctccgccgatgggccacgaagatgccgacgacgtgcaagcaggccacgtcccaccacctctatcggaccaatctctaccgtcgaaccctcttaccgggtccacccctttcaccttgcctcccccgcccgttatcgcatcgagctcttcgaaatcagagagagaacccggattctattctcaactgaggaagaacattatgcgcaatctcgtcttcaagggagaccccaaagttccctttgcaaactctggttcacctcccgtgggttcacctcgagcagccgaacggaattcgcacctctcccccgagacggacaccgctcgttctagcgctcggtacacacctgcacgatctcagggggacgaaacggaacgttcctgcctcggtggaggggacagtcgagcagctagcgaggaacccggtcatcctcgatcagactctcccatggagactggggaacacgatggacctcgatcgaatgaccaggatatcagacgcgctcagtgggatacggcgccggattggactccgccgcagtccgaggtggacccgtatgacaatcctgaattgcaaggacagtacaagacggctttccgccccgagccgtccaagaaaaaggccaagaagaagcgagccattcggcccgccgtttccctcaacgctggagatgcgacggcagagggatcgttagtggaaaggtccgggctggagcaagaaggtaccccagcgggaacagagaatggggacggagtggcaccggtcaagaagaagaaaaagtcggtcaagccgctcatgaccgatgaccctaacaatatcgggacatggtgagtggacgagcatggccaaatcttcggttcgaatagctctgacttattgctggatatacaggagacgaggtctgaagaaaggccagacacgggctgacgcgattgccatgtttaaggagaacaatcctggaaaacctcttcctccaggctgggacttccctaccaacccgcctgagaaacctgtcgttgtcaggacgatctcgttcaaaaaggaacctccaccgccaccacccgagcccaagggagatattttgagttatgtaccggtcgagcagacgttgggctctacattgcagcctcagggcgcatccgaggaagtcaagcagggtgagtgaggcctttactaaccattgatacacgtccagataactaaacgaaagtttccattcagaaatcgttttatcgactggaccttcgagaccagtggccacagctatgaagatcgacatcacaaaggcagacgagaccgatttcgagaagctcggcattgaaatcggagaaccactacaagatccagaggccgtcgccacgccggaaaatgtcggtcatcccgtctttcgacatcatgtggagatgcgtggactgcctgttctcaaagccgttgacccgagcaaggtaatacatttctgcttggtcatcgtagttccacgcactcgctgaagtttgacgctcaatagagtctgaaagagcacgatatagtctgcccgcgagagttgaaagagaatttgactggtcactcgagaaagtttgagcagaaagagctggccgtgacgggcatcggtgggtatagcttgaaattcaagacatggtcaggaggtaaggcttcatcaccatgaccccctacctagggctaagctcatatacccgtctactttgagcagaagctggtaaatcgtcgtggcgaacttcgcgcgacgagagagtcgcagagcagctgcgagtggcagaggaagcgatgatcaacgatcctcccgttcttgggccagagggaacgccaatggctggcgtggaggggaccttcgatgagaccggtcaattcgtgccaatcacacctgcaggcccgaccaagggcaagcgaggaggccttacaaagctgggcaaacagcgtaaagcatggacaaagaagacggagaaaggggacgctagcaagaggatcttggactcgctcaagcaacaagaaggcagtccgtccgtcatgggaactcctgatatgggcacggcggcagtcaatagtgaggtagcgtcctcgccagctcccatgccagagctcgacgacgcagccgtttcgcaagcagactatagtcgcccgcctagcccgatgccaggtctgagcgtggctggagacgacgtagatgccgagatggaagacctcttatgatcttgtcataaatattgtatctgatgatccgtacagttggtgtcgtaacgataaagattcgtgacggtagattatacaacattcatcgtctggagtgcctcattagtgtcgtttccggtcatgctttgcagctcatgtcatgaggttctgcatcttttcgacgatccccgataccagtacgagaagaccggctgcggccttttgcactctgccttctttgcttcctcctacattcgtagtggtcgcctggccttgagactccttctgcaagatgtcgctcgcccattcccctgccgccatcagtgtgagactcttttctgttgcgattgcacgacctccatccagttcttgagcaccgtctacgctgacgagcgcgagctccaaagccgtcgccacgacatcggactcgaaggccttctccttgggagacccagtcagtggcgtaaactcgggtgccactgacagctttgatccaacgcttatggctagttctagcgcttccgggcagataacagagagatacaggggagagtgccgtgctgcatggaccatgatggtcaaggtcgagaggaattgtgatacggcgagcgaactgaggatcgttccggtccctcctaccgcgtactttccctgtgtttgctgctctcgcgtgacttcttcttggagatatgtccagaatcggttgatcattggaaggataaaatattctgccgctatatccttgaaagccagcttcggtgggtgagcattggcgatggtttgcggctgttccacaaccttgacctgtgcagccatatctgtgattttgctcctggcgctcgaaccggcgaccctgagctgccgatgccgcactacttctggatgcttgtctgccgtcgagtctcgccctcttcgcaaaacctcattggttacggaatccgttgcagcggttatcgtcttgttagcctgcaggaagcccgggtcggaagccgaggcgtatttcgcgtgcaaagccgggggcaggaatttcgagggaaagtcgaccttggctcgccgttgctcgatggcaagcggcaatccggcacactctcgagctcccatggagaggcctgtcaggatggcagatcgctggacgagcgaatattgcgcttcaaagtaaagccgaagcaggagacttgatttgggaggaaatttagcaccaactcttgcagccactttcaagctgtatacgcacggtgcaacgatccgaggtgagcaagccgtcaatgccgtgacgatgccctgacgtctcttttcaaagtcttccaagtcgtaggggtccgagagagccaatgtttgatgaaccagttcctcggcattctcgtctatcggtcaggaaacccacaccgatgagcccctggtgcggtggatcagatagacgccgcgtcactcacccaattcggtaccataatctctcttgcgtctgatcaattcctcgccccacttgagagccacttcaagcttctccggttcggtcctggcgcgcaacagctccaacagctgcatcaggtagactggtcgctgtaccttttcccgtgtagaggtattcagcatgggatcgttggcaacttcttccaggtaggacggcgtaggagaaggcgagcgtgatgatgaaggggaagagtccgagtagccgaccaacgaatcgtcgtctgaatcgacaatggctgcgggtttgggaagtttcgtccgggatgatcgccctcgaaccgggtgctgtgggacctcgtcgtcagagtccgcgtcctcttggtctccatcggtattggacgagttattgcgctccacggtatcgactttgggggtatcttgccacccgagcatctcatcaccaatatcaatttccgcctgactgtcgcagacgcccaaaaacgccctcaaccacctgcactcttcccggcctcctcctgagccctcccagatgtctttaccgaaatccaatcgcttgactttcggcggcggtctggtaggtgtcgatctcgaggcatctgccttgtcatccacgtccaaatcatccagcattccctctagctccttgacgactctatccttgtcttttgtctttcgacgtcgatcccatgcgttctgctcgtcctcgtcgtcgtcgtctgaagggatacttctacgactgatgatctcgcctacgagcatccctaggcgccggatcgccgggtccgaatgaccgaggtacgattgcatcgagacgaggaatggcgaatgataggtgatcctggtgaccagcggatcgtagggcggtaattccgagacgagcaggatgatcaacaaggtcaagactgtcggtgcgcgcccgagttcccgtcagcccacctcgttcaggccatttcgatcgcacaagggcgcgcgctggatcgactcacaagctcctcgccccatcaacccgtatttgacctcgacgggatccccccagacgcgcatcacctcgtctagcacgtacgcgacgacctctttccccgccccggccgagaacgtgacgatcgccctcgccctgaccgccatcctttcccattcacccgatcgtcgacctcctaccccgagatcgagccgaggtgtagaagcgtgcagacctgtcggcttgaggaagatgagcgggaagatatcctgtgtcagcgtcccctcgggtcgtttgtctggctggccggtgaagagacagaggagattggcgatcctcttgatctgaccgtccggtcgaggttgatccgaaggggtcgtccgggaagtgagcagcgtgaagaacgatcctacgatggctctccgggtcttgctcggggattccgcttggatcgtccgccagaccgcggcgtactgcttggctctgggtcgatctcgctcgaggtggtcgacgagacgtgacatgcaggtgacgaagaacgctctggcgggggggatcggtgtcggtgtagacatgagcgggaagaggttgagcgtagtcatacgtgcgaatagggggaggaggggttcgacgtccgattcggctgggcaagcggacgcattaatatcagccagcagaacttgacggcaggtatcggaatcgggagacttgcattcccgagcgctcatcgtccagatgacctcttccacccctctacacaccccagcccaaaactcgtcctcgtcccaggtgcccaattcgctccccctcccctgcccatccaccctcaaccgaccgagtagattcccaaccttgctcgagagacccaagagcgtgctcgtatacgtctgtaacgtcaaatcgttcgctcgatcgtcatcggcccggtctgggcggacgatgaggtgcgagtagatccggtcgaatgggtagcgcaagaggaggtctcgcaggatgtccagcaggtggacgatatcctccgatgtgagctttgttgcgggtgtcaaagacgaagagatcgattgaaaggaggacagagctactgtgatggccgtgtcctcgctgagagagatctccttgtccttccctttgatcgatcccgacgagttcggggtagctgggacgaacaacgcgtggaccaacttgaattcctcactgtcgattctcaatgcgggtctccatacggggagaaccttttcgacgagttctttttggatgagaaaggtgaccttgccgatcttgtccagttgcgaggtgcgtgccgaggctaggtcgtgcgagatgttggagaggatcgagtggaggtcggagagcgaggtgatcggtcgggacagcgtttcgagcgagcgacggagggattggacgatggtgacatcttgggccatgatagtgttggtagctatccccctagtgggtagtgggaggtggtggtggtcgatacagtcgctacgttgaatcgatacacaatagtggttgagtgtcttagcgagtggttgatcgttcgtaacctccttgacaacttggtagcttggtagatctatagctcggaagtaaatttaacggacatccacctgtttactagctagtcgggagtaaatgaccttggatgtccgtcaactcactcttacgttatccccccctcccctctagggtagttgtggtgagatttctcgtttaccccctttctcaccaaatcctgtgaatcccataggctcacacccgcacatcgatggacaggcaacctgaccctacaacttgccacacacacacacacacacacattacaacacattccaattcctcccccgccctgcccagttgccaaacattccatcgagccatcactctgaatagtctgacctcacacaggatgcttctcaaatccctcgcccgacccgtcctcggctcgatcccgcgtcgatcgctcttggccaccaccaccactcgatcgttggccaccccggcatcaggtcgtctcgatttcgaacacgcagccaccaagacgcaggaaaaggcggccactcgggctcagagtagccccgtacagagtcattcggttgaagagtgagtgtgcgagtcgacgtcgtcgctgggggggtggctcgggatgacgatcggagggaggacggttcatatggtggccaaaacgttctaccgatccctacgccatcgcgatcgaccctgcccagagcagtcaccgtgaattcaatccgacaaggcttcatcttgctaatcatctcctccgatctcattttgcaggctccacgagctctcggctgaagagatcctgcgagagaccggttcccgaaaagatgcctcgatgcgacactttaccggtatgtccccttaccgcccttacccccctctcatctcccgctcctaacctcttgctcatgcttcgtcttgtacccccccccccctccccacaacagtcaacttcggacctcaacatcccgcagcccacggagtcctccgattgatcctcgagatcaacggagaagagatcctccgtgccgacccccatatcgggttgttgcaccgtgggacggaaaagttgatagagtacaagaattacacgcaggctttgccttatttcgatcggttggattacgtcagtatgagtgagtcgtcaagggggtcagggtcgggttgggtgtatgggagcttggctgatcacgctgcgccccgggacacttcgtagtgaccaacgaactgtgctactcgctcgccgtcgaaaagctgctcaacattgaagtccccgagcgggccaagtggatccgaaccctgttcggcgagatcactcgaatccttaaccatctcatggccgtcctcacccacgccatggacgtcggcgcgttgaccccgttcttgtggggattcgaagagcgtgaaaagttgatggaattctacgaacgagtctctggagcccgattgcacgccgcttacattcgacccggtggagtcgcttacgatctccctcatggcatgttggacgacattttcaagtgggccactcagttctctagcagggtagacgagatcgaagaggtcgtcacggggaaccgtatctggaagggaaggaccgtcgggatcggcaaggtcaccgccaaagaggccatggattacagtttctcgggagtcatgctccgtggaagtggaatcccctgggatatccgcaaagtcgctccttatgacgcttacgatcaggtcgagttcgatgttcccgtcggtgtcaacggagattgctgtgagtcccccaagaacggtggtccacgcacgcggaccctttgattgtgtcgatcgatcgatgactgacgacgaacactcccgtccgtccatccgcagacgaccgatacctctgtcgagtacaagagttccgtgaatccctccgaatcatctcgcaatgcctcaacaagatgcccctcggcgccgtcaaggtggacgaccagaagatcgtgccccctccccgagccgccatgaaagagtccatggaggccttgatccaccacttcaagttgttctccgagggttactcggtaccccccggtgagacctactcggccatcgaggcccccaagggtgagatgggtgtctacttggtttcgtgagtaccggcgtcgagatcggaagaggcgggcgagtaagctgacgacgactcacatcgggattggccacgtagggacggatctcaacgaccttaccgatgcaagatccgagcgcccgggtttgctcatttggccggatccgatttcatgatgcgtcaccagtgagtcgggacgcgccgctcgacttgtcacttgcggatcgaaagctcatctcggtctcttatgacttttcttgtagcttcttgccggacgccgtcgccatcatcggaaccatggacttggtgttcggtgaagtcgaccgatgatcgagttgatgaaattcaaaggaacgacggacccgacgatcgaaaaggagagcgacgggacgtggagtgtgttttgtgtgatttctgatccagcgttttgtaattctcgggggatcggttgggtggcgattccctcgatccttcccctcccggccgatatcctctcgggggatcggctttgcagatctaataggccgaactgtcagggatcttccctctggccgaaagcttggcagtcgggccttgtaatatagtcggatatcctggttgataagatcaaggatgattacaaagcaccttcgggtcgcgggtcgagacgaccgcgccgatggacggcgaaagaggcgttcgtcgcacacatgtagacggtatgctttctttggcacgggctgtctctccaatgagttccaggactttcttgatcaaacagcgggcagccgaaagagtaccgggaggtagcggctgcaccgatgtctagcacgccggcaccgaccgcggtcatgctggactcggaaacgtcacttgaatctgaagtgcttcccaagtctaggcgcttcagcttaatcaacatgtgtcggtgttgagattatctatcctcttccttgcgtcaagacagaaagaactgctgcaatctcctcgttacgtcgaattaatatgaacttctcgcttccttccacccttcttctgtaggcgaccggttcctaatcggacccgaccaccattgatccttcttcttgttcagacgctatctcaaaggtcccctcctcggaggccttctccaagtcgccgagattgctcctcggctgactttacgccgctgctgtcattattacttctccccccctcgcggtaggggcggtgggggcaggaggccttatgggcttcttccctgtggcttcaggcagtgaaggagagggttgatgggccagaggtcaaggggggagcatggggggggggggggggggggggggggggggggagatctcgagagaggcttacgatgacggtcggaaagccggtcgtgcaggttcttggccggccaatgtcttcagagtgtttggcccaacggccagtttggtctgattgaacaagccgaatcagctcgaggtgtacgcgggtcatcggtcgacatgaagcccaactcaccgcgtgctcgaccgcttttcgcacgaacgcctctttgctctcctcgtcccgatacttcatgacctgccccaacgattttcgcgtgatccccctcaacaagccgacctcgcctacaccgccgacgaccctctcaacagtctccttgacctgagcgcccgtcttagcgagcccgacttcccggccgaccgctctggcgcacatctcctcgacgacgtcccgtcgaccgtctaccaggctgacgagcgccttgggcgcgttgtcacccggtcgacgaccgaacttggttatccgtgtgtagccgccaggtcggtcggcataccgggtggatagcgtttcgaaaagtttgggaaggagggtcgtagggggcgtgaagttttcaggatccgatgcgaaggacgatgaagaagtctggctgaggatgggcgaggatgatgaagaagctgcaggtgcagcataatgatgtgcgggctgtaatgacgacgattcgactgtgttcaggctggtgaattttcgttgtctagcggtgccagattacgcacgaagaggatggcctgcgctgatcgccaagctggctcggttcccttctttcctagcgtgatgatctgttctcattgaagacagttcaaggtcagtttcgagacgatctcggtcaggctgagactgctaaattcaccttctctgccatcctggcggcctcttttgccttgggaagagtagtttgaatctgctcgtgatgcaaaagagctgacaccaagttcctggaggcgataaagatgatcgtagattgacgtcagctaaacgaaattgaagtgacaaaaaagttgagcaggatgacatgcgtacctgagtagagcctgtcgatgggacgacgttcggctgagctttcgcatcttgattccgtgcttcattgcgggcaataggaagtgctataatctagtctattggcgatatcggtactagtgggaccacgatgtcaatgatcagtcgagctgaaatggtttcttgatcgtcgacatctcgtctcgctcgaagtctgagttgctagttgacctgcgtagtgtgacgcgtgagaaagcttcaaatcgatcgtttcgcgttccccccccccccgctcagagcacggcctatcccttggtcgatctctcgctctcgaggacaaactctgatcccaaagctcgatcgtccatattcgttcgaccagacgtcatcttagtgctccattcccccaaaaaccacaccaacaacttgaatccaagtatacctgcataacagtcctctacaaaatgctccgtgccatcctccccacccttcgaactgcccttccccgacccatcgtcgctcgagccatcgctctcccagcacgaccccaggccgtcaggttctacgctgccagctcgggattgaacaaggacgacatcaccaagcgagtgatggacgtcttgaaggagtttgagaaggttgacggagtcaaggtgagcatccagacgatatgtttggctgggcggagacaggcagaaacggtggagatcggactggatcggactggatcggacggaagatccgagtatgacgaaccccgtcaagtcgaacctacaaattacgtgcaatcggattggtcccgcgtcgaacccagatcccaacacccccagcactccctacctatctgtgttcgccgatcagcttcctaacgatcaaagactgacccactgttacctgtgtttcgatctggaatagctctctcccacctcttctttcaccaccgacctcggcctcgactcgctcgacgccgtagaggtcgtcatggccatcgaggaggagtttgccatcgagatccccgatgaggaggctgatgccatcactagcgttggtcagggtgagtggccgtggtcacgagtgatgaggtccggtgcaggatggggcgtaaggcggcatcttcgatatcgacgaggactggtggtcgggcataaacgtctgggcacaacctcgctatcagtccattcgatcgctcttgatcggcacaacagcccatagatgagctcgtagatgcaacattgccatccctcctggcctgcaccggcgaccgagtgaagaagtctcttgagaacattgctgacgatcgcacgttctttcgatacaattgcggtcgttttaaaatagctatcgagtacatcgccaaggttagtggaaatcgatatagggaatcgcgaatcaggctctgatgactaaactcaacgatacatccctttccgatatcgtttgaaacttgccttctatcgcgtttgtagacccccgagggtaagtcatcgtcgtattccctatggacaacctctggcaagagctgatcatcgtcctcttgcacacagcccattaagcatctcggtccgctcgagtgaaatgaggacgatcttttctcggtccggacatatggtcccaagattacggatcgagtttgggtctagaataggtcatggtataggacagatgtgcatgatgtgaagctccagagaaacgaatgtcgtggattcacccgttgatgacaaaaagaaattttcaattgacatgctcaaagaggttaattagcctcgatgaggctaaatgctttctgagcatgacgtggtgactggaagtggatcagacgaaatcgtcgtggacatgagcgccgcatgttacacgaaggtttgagtgtcacatatcacacgaagatcgaaagattctcactaaggtgaacaagtagatcttcatttgggtcccgcgtggtcacacgctcgaccttacgagccaagttcttgtcctggagtctgacagcatacttcctcatatccgaatgacaaggggccggtggtactcgctgccagtttcgtctggtcgactggtcgatatcagctgtggtagctaagatcgctgctgcgacaaattcacggttccccagcatgacatcctgagatcgacatgatcttgctagtcctcggacttcggcctgatgacgatggatgcctttgcgaaacgcgtttcagctttgcctcctgttcaactcgaagttgtcaaaggagcgataggcccgcggtctcacttctcagttgatataacctgagagtgtgttccggccaaatcaacgatccggagatcgtgctccgtggaacggcctcgtgcgcaatacgctcctcctgttccgaccatcctcataaaatcggctcgctcatcaaccctttcccatcacccttgacccgtcggaagaaatcctcaacgtgcttccactaagctgcaggcctcttgcgctattcttcacgcaggacgaggctcctggcgatggaaagaccggtcccgccatgtgcgacctcctcctccaagcgacaacgcaaatctatttcccgatcatacgaggacgaggacgaagacactgaagttacaatgtcacttacgattgcggctgcttcggcagtcagcgcgacggcggcggagtttgccaaacgcgattacgatcctcgagccgggactggacgtcccgccggacgccgtggaatcgagcgcaagcgtatgaaacgtcaatttggctttggagatgatgaaatttcgacaacggacagaccagaagaagtcgtcccgtctgattctgttactacgaccgcgtcagctggcgcgaccgaaacgacttcatctaccagggttcagcctttaacaacagtagcagaggcttcatcctcaccatcagaatccccttcctccccggtcgagacgcggcctcccacaacgagtcggtctgcgaccagtacctcctctgctacagttgatgccacgatgcccagcgctgatgttacccaggaaacgttacctgtggagccagagtcaaccatgagctctgataaggctgcccctaccagtacaagcagaacaacggggataatgacagatccaccagacgctttggcctcgagttatcttgacatgtcttctacccgcacttccagcagcaaagataccggaatagttgacagcgcgacaaaattcgtggcagatgtctcgagagcggactcgaccgatgacgtgaaagcgatgtatagagctaatcctgtcggtgcaagtaagtcgacttaatgaattcaccccagatccactgcgctgacaacgctttgaaatcctagttgtggcaggcgtggtattcgtcttcatagtgattttggttgtatgcttgtggaagcgtaggaagaggaagaaggagcagtccacggtctagtgagaagtggtcgaccgtcttgtcgaagatcctacatatctttgcgtcggaagacaatgctatgggcaggttgaggaaatacaagtgctggctgcaacgaagggtacctccgtagtcttcacgtcgagttcctatcggcagaaacgtatctcgctaggtatactgctggatttcaggcttccgctacataggaatccatgacgtctccgcaacttgatctatatggttacaattatgagaaatccatctaaagaaagtatttatgaaagggcgtctagcgccgtagtctatatcgtcgagtgtccatgaatattatgcgatcgtgatttcctagcgaattcgtgcgagagcagatttgtgaacgccgctcattccagtcggtactttcggagcttggtggtctcggcttgagaccggacgcatcggtcaccatcggtgccgctgacagcgatgtagccagggtcacaggatcgaacagtgcatcgaccagcgttgcatccgacggaagccgcgtggctctgaaacatgatagcaggcgagttgagatgtcggtatggtggatggaactgactggcaactcacgatagcggtacagtcctgggcggccgtcttagtagatacatcgaaggcaaaaggatcagccgaagcacaacctccacctagatatagaaccgtgctcagcaagagctagggaaatacttctgtacaaagacagcgcttacagtgctccaaatcgctgctggtgttgacacattcatagatgggcttcttcacggtccctccaacgaaacacttctcagtgcctgatcgactcggaaaaatcgtacggattagctgaatgctagagagacgaagttgcatttcgaatgctcacctgcagagcagccggtatccttcttccaaaggtgagacagatcggtatgagagagcttgggagcaggcttctggggcactccagagacgcagacttctcctttcatgaggcaggtagtcccgcaccaggcttcacaagctatgcggcggtttgctcttcgtcagcttctgccgacggcggcgcgatggacactgccccacgacccaccttgttcacaacaccctccgtgccattcgatgatatcggggcgatacttggcaaggacgatacacttgtcatcgatccagagctaattcggtgcaaagctacgtcagtctgcatgaccggtatcgttttgcgctcgattgcgtcgcagaactcactgttcgcttttcgacaccgttacttcggacaacttcgctgacatctcgtttgccaccgatcttgccatagtacggaacacatttgcagattgaggggatgatgagcttgtcctcatagcacttccagaaagggatcgagaggtcaacgccccagttatgggtccggtccaagatgttcaaagtgggggtaggggaagccatgatacacgggatgaaagaagcggccaaggtggcgatggaaagagtcttgacgatggagaacatggtaatggagatcgacgagactgaaagaagtcgatagaggtcgaaggcgaaagaaagtgatcagccggtgaaagatttgaagagttgcagaggggattaggacgggagacaggagacaggagtgcttggaccggaatgccaccaaatgcagagaaataaagaatacacaaggaccgcgctcgagccttatatgctgagaccgcgatagcgaccgatccaccgtccttgttacttgaaaagaaggggctcttgaaccacgtacaccagtcaatccgattctcaggaatcgccgctagtgatgtcttgatctcagatatcaacctctttgttcccagcttgctcgatccccgaagctgacgactaagcctaacttcgcttggtagcagtctcaagccacttgcgcatgtcgaccgaacacgggagtcgggccaagtccgggattcttgtccaggagttggccgagccgggacctgtgtcttcgtcaccagccggccatcagccaattttctgcagcatccggtggtcttacatcatgcctcgagaggccgggcagagagccgaatgctcgagaagcattatatgacgggcgaggagcaagtcaccttgcaaacggcgctggtggctttttcggcaaaattatcgaatgtctcggatgttcgttcacgcggatgagatttcgcgcaccgtcacctgcgtcggccactttctcgcttgctgggcgcaactggaaagcgacgggcactaagcatcgttcggaagatgtcgacgggaggatgcaagaaacgtgaccgcgggaagggcgtttcattttggcagtcatccggcggcacagtcccaaatgcttgtcgatatcggaatgacgttggagaagtctctataagactgcgacgcccgccatatttggcttacttcgcgagccatcggtctacaccggttcgtgataaactcaaatcccgggagattgaggtcagcccgctcgtcatagcgctttcaacaagactaggccgagcacctgtactggcttcaacagatcgatgccggaccaaagtcgtagatatcgcagtaatggggtcctcaactttgctcgatcactgtgcaacagcgtctgggcaaacgcaagaactcctggttgctataccttcgatgatcgatgtaacacgagctcgtcattagaaacacagtgtcaccttgtttctgcatcgtgaccaaacttccgcttcgcagaacaagtctacagtacaactctttgtgacttgggagccgacctgttggctgattagcttcggtatcggtagtctggtggggcagccgacttcttctgtgtgcacaagcacaaatacgactaccgccgtcatgcggaagggccagtcgccgcgacgtatgttgatcattcgccagataacaaccgggcatgagtacctcttcccccggttcgcagcatatgaatcacgatgtttcttcccccattcagttggtctgaacagtgtccccacaagtcgcccggtaagacgacgttcagcagcgtgaaacatgttcacttcagtcgatcgcggtctggaaatgccggtggatgatcactccgtggtcacgtgactgtatctcccgcaggccaccacttgagcctgccgaccgggccttctgataccgacgactagcgagggtgtgagagactgggacaccgacccggatcagggttgcccacgtttgcaaactataggatctgcctcgattgaaaggaaggtgagtggtagctagcgataaactgtgcagtgtacatcatttgacatttgacgacgaggggtatcgcagaagcggaaagctgcattcaagaccagcgaaacccataacgccaacatggctgtcatcatccgatccaggatcatccgcccaaccctcggattcatccttatattatgtggtctgcacgactttcgatacgcttacggcgctctcggaatggtcgtcatggggatcgctcaactcctaatggccactccgctcatcaaggtcaaaggggacggacaggcagaaggcgcgggtctcggggcagctttccgggtggggacgtttttatggctcgcatggcaggtatggggacagacaccggcagtaggattcagtatggtcttgctcgccatttaccaggggacaagggccaccggcacgttgttgctctcgtagaacgctgcacgtcgaatatgaagcagcgatgaacatcaatatctagcaactatgacgctctggtcgtccctgctactagtagaaagacggctcagtctgcgtagttgcaaatagctggggcaaggtcgaccggtctcctcccgggagtcagcaaacctcattcgcactgtcacgtctagactgcaagaatattagccaacttacaaccaccgcagctcaactgtgatctgtgatcacgtgaaggcgtagatgatatggacatgtgaacggcgagatcatagcgggtagaaagctagaaagctggtttacggtgttttgcggccgccagtctaccagctaccagaccacgctgagcacatctcgatcgagtagatcgatagcagtttgattctaccgaggattctccctccgtcaaagggggttcgactcgtcacatatggacaggtgggaagattaaatcctccgtgaatcgtccgaagacagctacttaattgcggggcacggggcacaaggggagcggctgcggcaaagtgcggaaacgggagcaaataggttgatcgagtggaggtcatcgagttgcgccagttgtggatatcgtccatgatgatgaattcagtcgaatggcaatggggctggctgccccgtcgcaagggcccaggagggattcggtagtaattcgcagggtaatgtcatcgtggagtggctcgatggatctcgattccagaagtgcaatcccgatcgccgttgacactcgctggatcgctggagcttataagactcaatatcggtagtagcagcccaaattcgacgcagcaccactttgtattatcaactcacacactcatctcgacagccggataaaagtccctcgatagttcaacaatccccttcgtgactcaacatatctacccagtacctagcttgaccaaaatgcctcgagtgatcctgactggcggaagcggcaaagccggacgacatgtcatcccataccttatctccaagggttacaccgttctcaacttggacctcatcgactttcccgacccaagcgtgcccgtctacacgctgaaggtcgacctcaccgactctggtcaagtcttcaacgcattcacctcgttgttctccttggacgaattctctctcgaacgtcccggtcccccgcagacgcccgatgctgtcatccacttggctgcctatgcccgcaacatgctcgtacccgacaacgagactttccgggcaaacacacaatcaacatacaacgtgatcgaggccggtaccaaactcggtatcaagaagatcatcatcgccagttccgagacgacttacggagtgtgtttcgcccagggcgacaaagactggcaccagtttcccctagaagaggattaccctgtcgatcctgcaggtttgtcacttggcttgtttgaaatgatgatatgacctgtagctaatcgaggtcggtcttttcctcgccatagacacgtacgcgttgtccaagctcgtcggggagctcaccgccaagacgttcaacatccgtcgacccgaggttgatatctatgccctccgaatcggcaacgtcatcgagcctcacgagtatgcccagaacttccctggatacatgaaagaccctgcgtgtaggaaacgaaacgcttggtcatacattgacgccagggacttgggtcagatttgtcacttgtgcatcgagaagagcggacttgggttccaggtaagtcgtaccggataccacaggtcataagccgtgagggctgacccaccggtctcttcgcaggtgttcaacgctaccaacgatacgatcactactcttgagcctacgaaggaggttttacaaaagtactaccccaacgtcaagatcacccgggacatgggcgagtacgaggccccgttgtcaaacaggaagatcagggaggtgttgggtttcaaggacgagcataattggcgcgactacgtggacgttgagaagctgaaggcggagatgtcctaagtcccattcttgcgtttgcgacgaaattgtaagacgggaagctcggttctaggtcaagacatatcaatcatactgctatgatcaccaagccgtcagcctgtcctggcttgccgcgctgagcgtcttgtgagagcggtcctcgcatgacacatcggacgaggctccaccacccagtttagtctgctcttttcgcgcttcgtttcgccttccatcattgaacaagatccctagacggggtgacgagatccggagtctatattctacctaaatagacttgcgagaatgaatgttcgcatcgattcccactcccgcatcaactcgtgtcagccgattgggactgttttgctccgaaacaggtcggtagctgcgctgggtgttatcagtcgtacatttgcttggtaaaagacgcttgatacctgtagagtaccagcagctctgttcaaatagccacgcttcgccgtcaagggccgtctcagatcacactcgagccttgagattctcgaattcgagtgaagccatctcgaattgtaataatttataaccatatttccagtttgcgcgagttgaccgctcgatcgcgtttggccgaccggaagaaattatgacaagctcagctcgaccgatagaccgagccatatcaaatactgagttcgaacgtctggcacttgtgttcaccgatatcagatcagcttcaagaaggtcgtctcattcaagaatagctcctctctccacctatcactgacttttgcacgatgccgaaagccgacaagtctgcagtggacaagcgaagagctaactacaagaagaacgcatacacgcaagcatgggccgaaggtagattcgttaaatccaagggaaagggcaaggggaaggcagacggcgataatgatggcgagaacgaggaagaagtcaaggtgggctatcgttcgggacgccatcgatatttgatacttgagctcaataccgtttcaaatctagcgtgagcgtctcatctacgctacaggaattcgagcgccgggggttgtcgtcaactgcatgcgaggaaaggagaagaagtgcggcatcgagttgttggcaatcttcaacagcgcaagtacccttcacactctcgtcgacagggactacaagctcataacgtcatgtcttgctgcagattgccgacgagctctacccagacttgaagctagaagattctgatgacgagtctgagccaaagtcttcgggaccacctaggacgatggaggaggagctgcaagcagatatcgaaggtctcaaaaaggagaaggagaagaaagtctacagatttagtgagtcaaggaggtactgagctctgagcgcgatgccgtgtttgaccctctaacatcccgctcaggtttcgttcagaccaaggtcgagtgctgtaagtggaatctctctgcacgccgagacctcatgtactgatcttgcaaggcgtcagtcgtatacattcacgtgaagaagccgattgaccccgttcgggtggttgagcactacttgaaaagcgtcgaagcaaccggattgacacaggcaaggtccgtagcgatcgtagagggcagtgaggcgacatctaccaacaacactgcctcgataggtttacgcagagacttattccttgcaaggccgtttgcggcttggacgtcgacaagatcatatcgctcagtcgagatattattgctgaagctgccgaaagggtgaaagcggacaagggaccagagcatgacatcactgtgggtaaagctgttgggggaacacgaagacttgaactgatggagacgactgattggcagtggaggatcaactacaatagcaagaccgattcgcgcataaacagagaggatgtattgacgagggctagggagatgtcagatctgacggtcacaatgaagggtgcagatatcgtcgttgggattgagatttacagagtgagcccaattcgccctcgcgattccacctgattgcaagctcatacagcccaaaattatagggtctcgctgcgattggcgttatgaccgagtttgaccgattccgaaaagtatgtagctgcgatcctcttacaaaccgagattcggcgattcgggctcagcgcttatctctcttggccgcttacttccagtacaacccgcaagagatctctctcgcgttcaacaaggccaaaaaggatgggaccggacgagtgaaccaagcgggccgagatggcaatatccccaccgaaccatcagcgacagttgaacaagccgaggccgaacctccccagccggaagaggaggttgcgtctttggccggcaaggcgcccgcgaccacgaacgccaatccatgatgcagctagattcgacgaagaattcacaaacctgtccaatacaatgctatgatggtgcttgtaccgctggacgaccattatggtgctgcctggtccacatgtcgaatccaccgaggcgctcgtatctggcatatgcgtatttgcttccttgatcaccaagtacaagtatgattgaaatgttgacaacagaggaatgatgaaagatactgcgagaatatactggctacacatgggatgacgtggttgttggcaacattgtgttgccgtcctgtgagatgtaggtcgtgatgtctttcggggagaaacccgtgacgatgggcaaaactcgaattggagggtgatcagtgcatgacgaagcctggcgtcccgttggctaccgatctcctggtccctcggaaagatcccggatcacgtatagatgggcgactcccaccctctcttcttctccttcttctccctctccatcaatcccttgatccgcctctgttcctcgtccgagatcttgcccgacttgtcgccgaggtccgggtgacacttgtacgccttgccatcgagcacgaaatgacgcttgaggtagatctcatccagggggatttggatgaggggaagcgatgggagacaaatatccgtcacgttctttgcccagcctgtagtaacattcctcgacgggttcagcgaatgtatgagagagacgagggtggatcgggagcacgcacggaaatagtcctgacaccgcttcgccgtccatcctacgggtgggtcctccaggatactccgaaggttatgcagcttgtcggccaatttcacctgttgcgcctctttgctctttttcggtgcggtggcgacttgcaggtcctttctcgctcttgccgaaagatcaggcgggtccgtacattcctgatcgtgagagcaggaatcggtgtaagcgctcgctctccctacccgcggttccgcgccttttcgggatcaatctcgtagctcacccctacgatcctagcgacctcgtctccgaactccctagcgatctcttcgaggtcggtatccgtgtcctcgacggtatcgtgtaggacggccgcttgcagggtggctaggtgggtgaccccatacgtcgagagaatgtttgctacgccctgtcgtgtgcctcacgcgagagagcaaatcgaggggcggggcgagagaaggtggacgggaccatgtttcgtcagcttgatgcacacatcgaccatcgtgtggtggttgagcatgcaactcgtcacacccagttgacatacaagaggatggttgatatagggagtggcatgtttgttctttctccgttgattctcgtgtttctgaaagtcaaacgatgttccgtgacgtcagagccgaccaatgacgacaagtgcatcaccgccgatgatgctcaccctcgcactgaaatccaccgtcctcaacaacgtagcgacatcctgtacggagtctcccatatcttcgttcgttccgacttccccttgtgatgaaccgggagattccaagttgatgggcgacatgttgctgaatgcgacgacgaggatgacgaagaggatgatcgagtgggtgaacgctgctgtgtcgaatcgcccgagcatccgacccacgcggagtcgattcgtggtggtcgcgatcgagggatcgcttgctcgtcgacgctatgtatagctatgcgtatggacacacgtatctatgcggagatgaattgaactattcaatgttgattgtgatatggcatatgaaaggaatagatgaagcatgtgactgagatacatctcctgagatgcgaatcaagctgcaagcaggtattgatgcgcgcgagtttgacgagtttgagattcccagatcaagtaagtgatccgcggatacagaaatcacccacccagctaccagctactacacgcgaccttgcctgcctgcccctttggacaaaacacccgaccatcacacatatacaccctcaactttatacacagacatctctctccgtcagctgtcagtgttcaaccttgcgatccgtaaaagtcgacgaaaacagggacggaaaaagatccgatatggacatctcaactccatcaaacgcggacgtcgtcgaacacgatcagccggtcgcgccgggaaaggaacgcgagcgagatccaatcttgggcggtgacctgatcaacttgagcaacggtggtgtcaacagcgagcagcgtgagtattcatccattggcgggtccactactacgagggtgactgactgacagacaaatatcggcctgcgctacagcctcggagaatggtgatgcggatgagcaaaacgacgaggccgaggaggaacctctcggggacgatcctcagactctgcacaacctcgcgaccacgtacctcgcggctcaaacctacccgctcgtcatcccttcttattcggcatggttcaacttgagtaccgtgcacgcccttgagcgtaaatccctgcccgaattcttcagcggcaagaacaggagcaagacgccccagatctacaaggactatcgagatttcatgatcaacacctatcgactcaacccgtccgaatacctgaccgtgacggcgtgtaggaggaacttggcgggagatgtcggggcgatcatgcgagtgcatgcgttcttggaacagtggggattgatcaattaccaggcgagtcgagatcaagtttgggttgccgttgagagcaatgtgacctaaccttgatcctcaactctgctcacagatcgacccagagacaaaaccggccgctctcggccccccttttaccggccacttccgagtgacactcgatactcctcgaggtcttcaaccgcttcacccgggcaccaaacctgtcccccagcccgaccgaccggtcctctcctcttcctcagccgctccccaacctccacctcaccctaccaacctcgaccttcggaaaacgatctacaacacgtccgcccatgataccgttcccatcaccgcccaggacgcacaaaaggccatcaacgacagcgcgtccgcctcggccggtccgagcgtgaaaaaggcctatgcgtgcgaggtctgcggcgtcgattgtacccgggcgaggtaccactcgctcaaggacggcaagtacatcatctgtgtggcttgttactcgagcggacgattccccagtacgatgcactcgggtggtttcgtgaggatggatgacgaggcgttcaagcatgccacctcggccgacggaggcgagtggtccgaccaggagacgctcttgttgttggagggtatcgaaatgttcgacgaggattggctcaaggtggccgaacacgtcgggacgaggagcaaggaacagtgcgtcatgcatttcttgcaactgccgatcgaggatcaatacctggacgaatcaggcgccgagctcggtcccctgaggtttgccagcaagtcgttgaacgggtcctcgtccgccggtttgccattctccaaggccgacaacccggtgatgagcgtcgttgcatttttagccagcgccgtagggcccggtgtggccgccgcagcggctcagagggcgctgggagaattgacggacggactcaaggcagggatcaaggccagcgcggacagggcggccgagttggatgccgacgctgccgcaaaggagaaggagaacaaggaacaggacggtatgcaggtggacgactcgctagtcgccgaggtcgatgtggcgggtaccggtacgagtgcgacgagcgaagccaaggtcgaaaaggacgacgccgagatggatactgcgcgggaaaagtcgattcctgcaggggagacgacaacagatcaggccacggctaccgcttcatcatcgggtctgccacactcgcacgtccagcacgtcgcgacgctcgccctcggtgctgccgccgtcaaggcatccgcgcttgccgtccatgaagaacgtcagctcgaatctctcgtcacccgtctcgtatccgcccagatgaaaaagctcgagctcaagctcggcatgtttgaaaagtttgaagagatgctcgaacaggaaaaacgacagctcgagatccaaaagcagcagttcttcaaggacaagctcaacctacagagtcagctcgccaacgctcaggaactcttgaacaaggcgagggccggacagaatcctgctcaggtagctgcagacgtggcaaaggctgttcaggcgtctgcaccacagccgacagcgggaagtgtacaaccggttccgatggagggggttgaagtaccgacggacggatcgatccagcccttgtcgtaacagagcgcttccatcgcgcagtatctttctcgtcttctcggatcggaccggtcttttgtgtcaaggctccgcattaagccatctgccctcgttggctactttcgatttgtactactactagatccccatacgataatacagtggagatggactggtgacatgtcgaaacgttgaacaggcgaaagaggccgaccggatcgaaatttacttccgcgttctaccagcgatccgcatatatatatattcggcgacggcagtagcaagttggcgagatgcgaatggaatcttgctgtttctctatctctgcaacaatcgcatcacgacatcagagaggctaccgcttacttcaaatccaccatgtcggagccagaggagactctccctcgagctactgtccaaaaaatcgtcaaaggtgagcagggaccgggcactcagctgatcgccatcgttcatgtgctcatcaatgatctaccatcattctgccatctgcccacacacctcgacaatcgattactaccggagatcagagatcctctcgaacgccgagaacgatccctcgaccaaagacttgacctgcgcgaaagagaccatcgatgtactcagtacagcatgtgtcggtaagttgaacagcaccgaacgcattgttttggaagtaatttcaacctgagtcacttcccggaatccttacagaattcatcaaactgatcgctctgtccgccaacgacgaatgtgaaaaggacaagaagaagacgatcgctccggagcacgtaatctctgccatggacgtgagtctcgtgtcagtgcgaatctaccttttgcaaggcctgactctgcctactctgccttctgcaatagaccatcgggatggaacaatacaaagaggacttggccgcgacgtgggactctagcaaagagcaggccaaggtgcgtagaccagcaagcactaccttgatttgcccgagctgacggccatttcttgattgcaggccatccaagagaggcagaacaaggctttcaagacgaacggaatgtccgacgctgaactcgcggccgctcaggaaaagctctttgccgccagtctggcccgataccagggctccgacgtcaagcccgagtgatacgggtccataaaaccgaccgaaaacagccggacaaccagaatgagatcatcgtcaaagttgtataaatcacatgtatcgcaaatgtcgcatggccgcacacggcatggccactccaaccttgtttccagctattttgctcgatccctagtctgaggcgtttgcaaatagtatggaatgttttcataaccgtcaagtacagacggaatcgatcaatttcgatgctcgagctcttgtcgagatagatgacgacggaacgtaggtcgtgaaggtacaacgtgagattgtttttgcaaaatcgaaagcagcctgtctatgtgaccgggtctctcgggagtaatcaagtcgcctaggcggcgacggaagccctagccatcttcaaagcaccctctttggtattgttgcctatcacgagtaaggttcaggtgtcaaatccgcagtcggatggatcattgaagctcgcttcttacctccggtaaacccagatgcgtgaacaaagatgcatccctcaattccagagacatcgctgagagcctgatcccgaacacccttccagctatagcaacaatcgcaagcaacaatagtaattacgcatgagctaggagtcctcgacacaagcgtgaaccgaccggcagaacttacgcgtcaggcatgtccttcctattcttgaagctatcggctcgtaccgacacacactgaatcctccacttgccctcgggtttctcggagctctcggggtagagaacgtaaaggatctccttctcaggcttgatctgctcttcgagctcgaaaaagtggtccttccagggcattgactgcagcgagaacatgctcgagtcagcaaagcttgaaccgtgattgatttctcgacgtacttcgccacttgcctggtggaagaccatgatctggccgctcgagtcgacctcaaaccgagaatcaattgcggtcttcacaagctcccgagcgggaacccaagcgttgacgtaaaagtcgagctttcggaaaaactcttcgccggccatcttggaagcctgttcgaacttttgctgtgaaggcccgcagtggagtcgtaagcgagatgtaccatcaacatcaacgcagtcaccttacgtcgagaatggtatcattgctctcttcgttccagcgagggttgaggtctcgtacgcggccaggcaagttggtcgagtcgttgtatcgaggcttgacctcagtgtcgtacatcgagataccgttgtcgttgctgatcagataccgagagtcagatcgcctggtgatgaggaagagacgggcagggcagcttacgcatcaatggcttgtacgaaggaggagtacatcttcaaccagatggtgtgagtcttctcatcgtcctcggcccaaccgtacatggtgttgatgatgtgctttccaaagtgcctgacagaatatgacgactaatcgatgagacgcgcaagcaagaccgaaggcatggtcctgctacgactcacttccacacgagaccagcactgctgagcttgatggaaaactccttgccctcctccaattgacgtcctgcaaccttggaagaagggtaaggggcagtaccatcaccaaagacctcgtcgaattctctttgatggtgatcgtatcgatgacgagcggggtcgtacactccgccaacgtcgataacaacgtccaaggtgtccacttttacaagcaagagcccggtgagatcatgagatcgtggtgtgaaagtgcagggtctgctatactcacagactttgggatcacgagtcctggtcagatcggcatccttatactccgccgtcctcctcaagaaggaaatgcctagagcctcatccgcgtggaaagttcccgagtgcgttccgatggtctgtttgataccattccacaaattgcatcatcagacttgcgttcacgagcgacgctgagattaatttaaggaatcaccttggaagccttgagcttcttggcgatgggttcgaggatagaagacattgtcgaataggtcgcgaattggccgatggatcttcttttagcgggtatatatctcgtgaataatctcgagagcatccgaaaaagggtaaggcaacagtctggccactgtgacgagctgatcgatcgctacttgacctttgttcaagacgatgtggggtatgccagtcctctcactgggttcatcgatctcgcgcgcttgactttgactttttgcgcttctaatcggtcaaaggggtccagtaaagtggagtgagtttcagtgttggcttgacgtttcagatattgaaatagcagctatacaaagggcatgataactagctagatatggtcgaatcgcgatcatgataccacatgatcttgtcgaacgaccatatctaacctcttcaagcataaaatggaccctcggctattgcttgcggctcttttgctggcttgcaatgctggatatctgatttggaaagccaaaagcattccaaaggggaaaaacataagcaaccccgggtcatccgtgctttccagcaaggcaacaagacttgtaagtgccttaaaacaaccatcggagcactccaatacagcgggagcggaaaggtaagcaggactgggatagtcgctcagcgcgccggctctcgtgctgacccaacgcccattacgctcgatatcgcagcaatgtggaaaagcatgtccggtttgacaaggatacggcaccatcgtcagagggtgaagacactggaaaggcggatctccagctctctgaaactctcgccgagcgactcagtggagacagattcgctacgatcggccttggaatgaaagctcacctcctcagaaccattctcggcccagatgagaaggacaacttcgagtctattcagatcaacctctcagaattgcctttcactagtactgtacctcctgagaagagggatcgaagcgcagcttcccggatgctaggcgacacggcgcatttagtgttggacctccccgatctcgaggttgacctgactatacgcccggtggcgacgtcgagcaccgacgatggcgccatggcgtcagtcagggaatgggttcaggctagcaatttcaagcgctggatcagcattgacgtacctcgacccctgttgtccatgatcggtcttgtcgattcagttgcagaatccgcaaaagacaacgaaaagcatcttgctcaggtcattgcaattttgaaaccgtcgagattgaagctagcgtgcgaacctctggatgagggtagtggtccttccaagctctctgatacctcgaccccagattttttcgattcgacggcacctctgctgtacgccgcaaggatgccaatcgtcatggccggtaacgagtattttaccaaaccgaaacagattctcaattacctggagattggcccttggatccccgtcagtgatcgatgcgagactgaatacggattcgtatgttcccgatggcagatccgggtgctcgccattcgagtcgtatggcctgacaagaaacgtctcgttggacgaggtgacaagagtcccttgccggatatcctctgggatcgatcaatgggcttttcggcaatgatcaacgggcagacgggatcgagctgtgcgacagaggacgaacccattaggacccggatcgtcttgatattggaacgagcaaagtatgctgccaagattgcggacgagctgaatacgctcgccgaaaacgagagcccggcaaactctgctcgacgatcggaggacacgcgaacccgtctcgatgcattgaaagagatggtctatttcgtctgccccaattcaagccaggaggtcaagcatatcttctcggtacacagcaagaagaagagcagagacaagggagggaaacgtgccgagaaagagcgcgccgagcaaggtaaaaccattgatctgccgccactaaatccggatcgcgacgaaaagacagcaaatgtgaagagtagacaagaacatgtatagatgtaccagattgtgcagacgagcgatcctaaggatgtacaaccgacgatgaccgtgttgaatgacaagattttgagtttctggagtctgggaaccacgatgtggtgtggcatggaaggaggctgatgcaatgctacgtcatctaatcggaagacgagggtcggaggatggaggggagcgcagagacacgctgaggggtgggaggttgcccgaagcggctcgaggtgtcgagaagcatctataggagtggtagacagaatattagacgacagctttgtttggtttacggctcctgtctgtcttgccttgagcgcgtttctggcgcggactcgagaaaggtcggagctgtccatcaaggttgtcgtgggcacgaccttctgcgcttccggtccgaagggatactgcgatgatggcagatataagtgaggccatcacatcgaacgatatccgctcatgggcttacaggtaggttcttcttgagcatctcgtagcatacgagagttctgtgtcacgagaagtgggtcaggcgatcggtcgtgggtgtcgttccagactagatgcacttacactccgaattggggacttgaacggatgacacgagcgataccacccttgaaaagggctcggaagccctcttccttcgggatagtgatcaacgcgtcgatgagacccttgtaatgggtgacaccggctcgtcgttcggcttgcagtcgcgtcttgacacagtccgccggagtggtcaaatatgcagcgggcataccggcgattgccgcagcagtctacagcgaacagaatttagcgacgtgccgaacagagagacggaacgtcggggaatttacgagtaattctccgaaggacaactgcttgccttgacgaccttcatggaagacgtctttctgtgagaatcaaggtgacttcgggttagcgggttatcttgagggaagcactcctcggcttgcttactttgagatgggcatatgcggtaaagtagatcatactctgtacgaggtcaagcagagttctgtcagtcagagagcgctagccgaataaaatgcaaaaggtgctactcacgaaaggcactatgaaatcgatcgcgaatcagcttggatccatatcgaaaggtgtgtgcagctcgactcaccatctcgagccaaacaactcgtcacaccagtgtagagaccgacgagacccagagatcgaatgacgtggacggctcctcgcttgacggcgccttcttttcgcgcgagctctcccatcaactggagtcgaattttgatgatttctgacagcgggcaagggttgatatgagcggcgtgcccgggactttagcgaacgcgtctgctcaccgagggggttggtcacgacctgaaatttgttacgagggggatcaggattgtacgctctcccggtgcgggacctctttgcaaaactcacgacctgactggcacctgcagctccaccagccgcaaattcccagaacaaggaaatgttacccgtctctgggtccatcatcttgcttcgaacgtaatcgttgacggtcaatttcagggcctgccgagtgagaggaatgcacgagacatgagcgtgggcgtgacgcgatacgagatcaggtgacgttggactgactttttcgggtgcgactccgatcaactgcggtacgacacctcggtagaatcccttgactccaccctcgtttccgtacacctttttgatgcaatcccaggggtttcgatagaggacttcaccgacgacgttgctcctctggttttgtaatctatggggcagaaccacaaccgatcggtctttgctttgtacgtatctcgccggattgactctacctaccgggtcttgactagatcgatggggtagacggcgaacgctccgatacctccagcgacacctcccaggacaaagttgtagaccgagtggaagaaatcgttcatgaacccttgaccctcgactgtgggtgaagaatcgatcgagattcgctgttgcggtgatgtccactgcggcgccgccgaatccctctcgtttagcgtcgtgaaccgacccaccgctggacacctttgcgtcacgtaccttggggtccaacaaggcgtcgaaatcgacattggccaatctcatgctcgagtcaccgctacccctactggcgaaatgccagatgatgttggcttccattggggtgaaaattccatatctgagtgaatgcgctgcctcgttgagaaagtcggcggcggtgatccggccgtccttggatttggccgtcgcgtcccggatgatcctctcgacctgatccatctctgttggtatgccgagccgagcgcatcaaccctctgcccagtagtgatcgggaactcgtgtcgcatgacgacgcacctcgaatgatgttgtgaaacgcgatgacctcggaataactaatcttttgccccgggctcaacgtacacagcgttggcaacctctccaggacgggatccgatagtttatgcccggcgagctcgagcacgatcctctgaaactcttccggcttgatgtacccatcgccatccttgtcgaaatatcggaacgcttgacgcaggcgttcaccctgtagacccttgatgagctgggtgaattctgaatctgcgaggtcgaagatcgcgagaaggcctctcagcgcgggtcccatccgttcgcaaatcttggacacgatgaaacttacaccccaagacatgaccgccaggtcctcgcttcccgaggtacaatttcgcccaatcgcaatcgaaatcgaacgctgccaggaccgaccctcgcgatcagctttctcaccaacgccttgctgactgtcactcgcagcccggcgtgagaagactactcacgtatgctctcgcttccactgccaatgaccctagagaaagcctccttgaactcgtcaaacgtgatctggccgttgttatcagtgtcgaaatactgaaacgcgatgaggtagtcggcgtcgggtcgtttgaggactatcgagcgagcgagcccggtgcgagccatgtcgggtcggttcagctaacactcgagactcgtgatacgagcaagaaacggcatcgactcacgcgtctcgaacaccttgaaatcctcccacgagatccttccctgcctcccactatccgcgaccttgaacactgtatcatcgtccacgttcatgccgtccccattgggcccgggaggaatggtcgtttgagacggataaataaagttgcgtttcgttctcgatatcagccttcgggggatctctgatcgaggcaacaggggtcggaggacgaggacgaggacgtacggatccggtaagcgtcccgcttgatcttggagaaatcatgcgatggggcgatggcgtcgatgaaggattcctggtcgaggtacctgatacgcgcggaggcagcagggatagcaagttagtgataacgttgggtcaactttttccgggggattatgaaacaaggctcctagactccgaggtcttatagaggtctgggtggatgggcgtgtgtagagggaaagtcgacgggttgactgatgtcgaggtcgaggtgaggtgaccccgcggggaacatttgtcgtcgacgaatcgacgcccacccgattcgctcctccacccggaccccgaacgatcccactagcgagtcgtacccggtcgtgcttgcgatgccccccctgacgacactcacttttcctctccactctcatcctgatgagcaaatgcctcgaaagtctttttccacctgctcagttcggtatcgctaggtctagccttttccttgaggttggtgacgatgctcgagacgaggtgtctcgtcccgcccggttgtgaggcgacggccgtggcgtctgtgggagaggtgatggatgacattgtggtagagttacaactccctcgtcgtgttaattgggggtttgtagtgttgatatgatgctggaagtggtgtgtttgttatctgtatacgggggggggggatgtcgagttattcgggtcaaggtagcgtgatagctagctagctagcgtgtatgtacgtggtgcgtggatcggctaacggagggaaacacacagaggaagtgtcggtccgatggagaattaaaagagaggtggaaataatctcggtagactgaatagaccagccaaagataaatacaccgaagttataggtggatatacgcagtcactcgctgacttggatccccctcgttacgtcacctcgataacggcatttctcgacatctcccttttttgtttccaccccgaatttcagctttgaattgttgcacaacccaagcactcttacatcgatttcttgattttgatgaggattcagattgacatcgcaccgacaccgaaaggtataacacgtcttcttgtcatcatcctagtactctgatagagacccctcatcgcctcttgaccacattccgttctctccatacatctcaacaccgacgacccactcgacccagaagcaaacagcggtcaacaccagagtcacgagcaaacaacgccatcccgccaagatgacgcacacttcagaggtagagaggaggaggatcgtagacaacatggaagaacggatagggaacgtgagtccttgttcatcatactcgaccggtatcaaatcgtatcgacgggctgatgcggattcgcacgaaatacgacctggtgtcctccccgccatcgttgcaggtcgcaagcaaggaatacccgggcatctaccctggggaggaccattcctggaacctcgagaaattcaaggctgtacgtatccatcgccggtttctttagtagtgactgctctaccgtccactagccacccacgcttacatcccaacctatgcctcctcctcctccctttgccagggcctccgactcgagacccaacgtgtgaccccgtccactatcgaattcgacctcatcggggtggacgcctcgatcgccaactctctccgccggaccctcatcgccgaggtcccgacggtggccatcgagtcggtctacgtttacaacaacacgtcgatcatgcaagacgaggtcctcgcccataggttgggcatggtcccgatcaagtttgacccgaggatgttgacatggaaaccgaggaccgcggcgggtgcggatggttcagggttggattcgagtgagtggagtgctgccgggaccagggcggttcgatgggggggggggcgccagggtaggaatgctgagattgtcgcttctctcgtcgcttcgcgccgcttgaatagaacctgccgaggacgacacggtgacggataggaacacgatcgtctttacgctcgctgtcgaatgttcccgtaaccccacggctgcgagggacgagacggacccggcgaaactgtacatcaactcgtccgtctactctggccacctcgcgtaccagcaccacggtcgacaataccgacatttcaacctgcccctgcccgtggacaagcaggatgacgatcacgagatgaagggggacgattggagcgagccacccaagccttcggtcgaggacatcttgttggtcaagatgcgaccggggcaacagttgaacatgttgttgtacgccgtcaagggggtcggaaaggatcatgccaagttttctcccgtcggtgagtgacaggcatatcgacgatctccctctctctatctctctcctgcgttggatgactgatcgtcagcccggacttttcccactagccactgcctcgtaccgacttctgccgcacatcgatatcctctcccccatccctcccgaacacgccgccaagttccaagcttgtttccctcccggcgtcatcgacctcgagcacgacgagtcgacgggcgagcagaccaaggtggtcgtcaagaacccacgattggatacggtcagccgggaagtgtttaggtaccccgagtttagggatcgagtcaagttgggccgggtcagggatcatttcatctgtaagttcttcgccctggacagaggacttgtgtggtcagactgaactcgagcatcgacactgatccgttcctcttgccatgccatgccaatatcactggacgcagactcgatcgaatcgacgggggcttacaaaccggaagaactcttgcccgagagtatcaagatcatgctcgacaagatcgcctcggtggaacactgcatgcgggtcaaattccccggcttggtccccgcgagcaaagagatgcagatcgatccggaagaggcgttcgccaacgagggaagggcggtccctaccaagagtcggtcggcgggcgggaagaagtcgaaaaagtagtgtctggccgtggtttgcgccatgctcggtccgtctctgaggggcaaggaggtacggcattttcgcccccctcttcactttgatcgaatgtaaacgcagtagaggtgggggtaggaatggttgttgtaatacgtttttcccatccgaccgttatgccgcgttatcttgtcccatctgaacgagatgtcgtcgttgtcctccggtgactgaccctctgtcgacgccccctcccgcctcggttcttagtttagcgcgcgaacgatcaggtgctcgatttcgacatggtctcgaagtggtcgtgaacatcgaccgagaccgacgacagaaatgattttctagcgatcccgtgacatgtgattcaggcagttcgtctacctctcagtcggggtcgatcacatccagtaggtatcgatccgatccgattcttttcaggttaaatatacacgactctgctactaactgtttatagggtttgtgtgtttgttttgtttttcccattttcaaccgagacacagcccggaaagtagagtcgacatcatcatcgacatcatcgactcatactcggacataccctctattgctcgaccaccatcgacatacacacgatctcacacaacatatcaacaccgagtcaagagtgcactggctttcctgtgacccgcccgccgccctcgaacgtccctcgatcatgtcgtcgtggtcgtcgccgccactctctcatcgaaaaggaccgatccggccgttcaacctcgtcctgctcctcatctcgaccctctgcttgctcaccttgactttggctcaaggacctacccagaccgccaactcgaataccagctcgatacgctacttgaccacgaccgtcttgaccaccctttcacctacacaacagggagcttcccccaccccgacctcgttggtcctgactttggcactcaactcgaccgtgacctcgaacaacaacaataatgtcaccatcgccaacaacacggtatccaccgacccgaatactaacgtgaccaccgtcatctcctccacctcgacctaccccatagggaccctcgtctacccaaactcgaccgtcgtcttccctaacatgacctccctttacccaaacggtacctactcctggcctaacggcacacaatactcgtcgaatgggacggtgacgtacgacccgctggctcgggaagtatggaacgggacgcaaacgtggttaccgttcgagatcaagattgacgccgcttatggagtcgcgggagggttcttgatcctgacggcactgcctttgacggccctcgggggcaagaatcgttggtgagtcatttgaaccgaaatgggtgtgggggatggttcttagatagatgcatgggtgctcaagttgcttcttccggagagcaggtcttccatggcgatcgtatcgggctacacgaccatgcttttctgtctcgtcatggttctcagattcgggcaagtcctcgcgcgctcgtcgtattactttggatgcaggtagactgactctctgcctggctctactcgcccttagtgtttcgccgggaatcaaatccaacccgaccccgaacccgccgaacgcgactttgcgtggcttatacgctctcgcatgcatcatctcctctctcatcggagccggagccggagtcttcttttacaaccagacaaagtacctcgtacccgctatgggagggttcgcctttgcttggttcatagaggcttgtaaagaatcgggggccacggggaatagtatcgtgggcaggtggggtcttatcggaggtgagcgtcgagctgcggtctattgacgaaatcccccctgggtgaagaacaacatgctgaaatcatcgtcgtcgtccttcgctcgtctacaggtttcaccgtcgtcctcttcatcatgggcctcgtctccacgttccactaccacctcatcctcatctcgaccgcgttcatcggagcgacggcttttaccctcgggatcgattgtttcacccgggccgggttgaaagagttttatctctataacctggggttccgaggtggactgttccccaagctctgggctcagtcagagggacaggtcgggaggtgggtgttcccactttccacgatcatgcaggtcgaattgggcgtcttgatcgccgtctttttggtcagtccgccttggaccctcgatatgaatccatcgtcgatgcaagcactgatgtcgatttggccggctttgcagatcgggacggccatccagtatcgaatccttggaatgctgcagatcaagctcgatcagatcaaaaaggaagacgccgaacgtaaggaagccgaagaagaagcccgagcgacggccaggttcaaggagcacgataccgagctggaaaagtgggaaggcaagtatggaaacgccaagggactcggtggggacgtccctctggtcacactcggcaaggatcatccgtccagctcgatgcagagcctcgtcaggccgtacactagcaacgggtccgaaatcttgcatgaccccgggtcgatggagatgatccactcgcagtcggacgctcgtagcctcgggggacagagtgtaggaaggctacccgtcatagctcttggcgggagcatctcccctgctctcggggaagacggcagggtgcaatctccgacgagcacgaccgagatgtcgcccgaggaacgcgaaaggattcggttgctggacgaaatcagcgaggtcaagaagagtatcgaggtattgacgtcgacgactccgacgagcgtcgatgtgctctcgactacgggatcgtacaccgcagggggtggaagcagatctcgaactcagtcgggcatgtcgctcggggcggcatcgtttgcgagcggtctcggaggcggtgctggcgggtcgaccgggaggaacgcgcagccatcgcccatcactgccttgactcccactgccgccgaatttgctcaggcgaaaaaggacaaggagtggaacgactacctggccgagagaaagctgttcacaccgcccgccggaatctcgcccccgatcgagacgtctttcccacaacgcgctcgtcagtctgaaaactttggtcggctctccaaaattccggacagtgtcgttcaggcgatggatcgtcgggaacgcaccatgagtgcgtatgaactcggtgccaacgaggtggaccgtgaagaaatcgttcaaccccattcggcgaccttgcctctaggcgttcgccatagcgtccaagacctcaggcagcccgaacccagccatcaatggcagtatagcgagccaagcccgcgtgagccggctcatcagcacaaccgcctctcctcggcgcccatgatcacaggccacgcctattccgggacctccaagacgaatcgcattcgcgaatctgccgagtctaccagtcgccccgctacggagcgtacgatcacgcatgaagagctgaccgccagacaccgggccaagctttcgcaattgcaaaagcccgtgagcgagagcatgcaggaggagatccggatcgcagaagccaaggccaagttcgaaaagcaaaaggacgccgagcgaaagatgatggccagaaaagaagcggaaaggaacgctcagcgaaccaatcccgaacgagtcgctggtatgcccgattcgaggcatgttccgagagagtctgccgtcgatagggctgcacggtggagacagagcgtcgccgctgagcatatgcagagacccgtgctggacaccgcgcccgagccctcgcaaagggccaggagggaacattcccaacgagcttcggccaccatcgataggacgtcgactatcgacccgatcaatcgacgacaatcccgtggacccaatcagtatatcaactagacgcacgaattttacgaacggacaatattctcttggatttacttgtgcttagagcattttcatatcacacccttacgaactcatctacgacgcccttctcttcaaaccttgtcattccataccacattgtcttctgtaatacaataccggtcgatttacctcttacacaatgcgtatacagcgcacaaggccagctccttcgatacagtcttgttctatgcattgcaagccataccttggtcctcttacatcggatgggcccgtttcacatgataatacagctgttctcggtatcagggagatgctcggtgtcgtaaagggaggcacggaacctgtctcgatcgagagacattgatatgggtcgatcggcccgtggtaccctgttccacgtccagaagctctgaatgacgggtgcgtcggaacattcgtccgggccgccgttgagcctggacccgtcctggtaacgcagaggagccgcttgccatcctcgccaaccgttacgaggtctcgtccgactctccagtgcctcgacgacattgcgagagacaccgcggcagtccactaccgagagcacggtggaacggccccgtttgcgtacaaactctttgaccaagaggtcggatgccgtcgtgttctgaggctcggactcgtgagtggtacgggtcgccaacgctggcgggcgaaaggggtactcacatcgatatcgaggtgcttgagacaggaacattgtcggatcatgtccagcatggctccggccgtcacattacctgcaaagcccaggcatacagtttcgagtcgacttccaacggcattcgaacttatttccgatggtctcggggtcaacgccgacaacaaatcgtcgtcgatatccagggcgccttcgaggtcgatcttgcgaatcgctgggcatgtcttgaacaaatcgaccaggccggccgtttgcaagttgctgttaccatcggcactagccatttcgaatatctcaagagcgggaacggcgtgcgccagatattggcagctttggtcagtcagtctcggacactgagatagcacgagctttctcagcttgaggattcgtcgaggaacgaggcccttgcagccggtgaattctgccgcggcttgtccagcctggcccgatgtcaagaacgcgatgcgtacatcgcgaaggacgctgtccctgcgacaacgtgcagcgttcatcttggcgagctctgggacccattcctcgaatgagggggacactagatgctttaaatcttcatccgtgagatcagggcagtaggccatgtcgagggtctgaaggttaggcatacgagtcgctatggaggacagctccttggacccttcgaaaccagagatgcgcaattctcgcatgcttgggcgatccatgctggtcaggagggcgacgcatttgataggcaggtttttgcaaaacgccaagtcgaggtattccagtagtggacaacttgcaagcgcatgaatgtgctctggatacacccgattcaggcctcgaagggacagccacttgagcctgggtgaatggcggatcagccaccacagctcgtgtggcccgatctcgcgacagccttgaagatccagcttctctagccccgtgtcgactgtccctctggcctgcattgcaccaattaagagatccccggggaggtctcgccatccagccgtatcgagtgtgcgtatgcaagacgacgaagacctcaggaccttgatcaaggtcgacggtggcataaagtcgaggtagagagccatgtgacatttactccaaagctggccatccaggatcaagtcgttccatccggtacatacctagcacaacccaaactgatcaaacggagagccagtcagaaagccgccagtcgcactcactcgtctcatcttgagcaactctcgtcgacccgccgtctcgccataccatctctgacgcgcgacgtcgcccttccatcgcccttgccggacgatccgttcgtgatccgtgacgtgcagttcgaccagggcttgcacgaccatcaactgcaactctcggggcagtttgtcctggaagggtgaagccttggagatgggcgcttcgctgggctgtcgggagacgacaatctcgagcgtgtcatccgacagggtctgtgcggcgatcggctcgatcttgtccgtttcagcctcgtcgcgtgggggcgaggaggcggagacgcgtcgatctggggacgacgacgaggcaaagacgtcggacagacccatcgaggaccgtcgcggactgacgatcgtgccactggcgtgcgcatcgtcgagcttggtcatcgattcattaatgactgtcggggcggtccgtggaaagactggtgtggtcttgcttcggatcattagccgcctgatcaaccctttcggttccttcagcccggcgacgtcggtcggtccagacgaggtctcgaccagcgggcccgacgttcctttgccgaccttgctcttgatcttggtacggacgttggtcagcctgctggacaagctagacatcgaggccgtgctcgataatgagaattttgaagcaagactcgccgacgagctggaccggggtcggttcttgagccactggggcaggtctttcttggacgagctcggaccgctaggagcggcggttgccaggggacgaaaggaagccggagtcggtgtggccgtccggctaggaaggtctggggttgtagatccccgcgaggtcgggccgaggatgacgggcgctgtagtcggccggatttgtaaaccagccatcgtcacgttgtccagttcgtccatgaagggtatatcctcttgccatcccgacgacatcccttcatcgttcgtccggacgacatgcggatcttccgccctacctttccccttcgaactcccctcgaccgcgaatgtgaccgcatcgccaaccgcaccccacccggctccgcgatcgtcgtcccacccgggcgtctccggcgtccctagcatggagtccacactccagcccctctccctgatcgaccctgtgcgtccctgtcgtcgtcgatcatcctcgggggacccgacgagggagggcacatcccacccggcgttggacgatagtgagccggcgatcatgtcagctgcggttgacatcgaacctgaacctgaacctgagcctgaaccggatgggtagctggattggactttcggaaggacctggctctgtctcggttcggcttgaatttggggaaaactacgtcgaggtccatcctcatcctcatcctcgtcgtcctcgtcctcgtcctcgtcctcgtcacctgcagcccgagtccgagtgcgaagccctactcccgcaacatcgacccccaaaatccaccccgtcgtcgttgttgtcgtcgtcgtcgtcatcgtcgagcccgagatcccatgatcatcctgttcaaacctgaaaaccccggctgacgagagagtcgtcgagttggttctcgatctcgacttcgacctcgacctcgaatcggactttatattggaattggaatcggcgttcaggttgttacctgggcggatagggggtccgggggcggggtggacgtcagtaggatgtggggttaggtccatgttgatcggatgtggttcctgatgtcgatcggattggggtcaagagtgatgtgatcgttagcaggtgtggatgtcgatgacgggaatggtggtgatgatgacgaggatgataatggtgatcgtttacgacggcacagactggacgggtcttctcctcgtcttcatctagtccgagtcgcgatctctacagtctgcatatgttgaagatcgttggcgatctaccttgcaagtcgcaagtccgtgatgacgctatgaaatgtcgtatcgaaattacagtagtattggagttatactcgtgaatggtggtcgatggcagataacgtgacctcgtcgtcgtcgtcgtttaccccggagctagcgtaagctcggaagtgaggtagcagagcagagtgataccaagtcttcatcccgatatgatcagcccagggcaggtcatcccacgagatatctagacgaggtcgtcgcaacaccctgctctgctgtacagaagagtcggggagtctgtgtaggagctggatggcaggacatcgatgtctgtcgttgaatggtcgtgtgcgtatgatgacctctgtctctttcattgtcggacatgtccgaagagagagatgacctttgttccagggatcaactctgaccacacttacttcatgttcgaccgatgatacccgtcgacctacgacgacttcaccgtccgtttcgaccgagcatgcttaacctcttcttcggagtaaagatgttcgacgaggtggctgtccatcttgactggcatgtccaaatgccgttgccattgccattgccattgccattgccattgcgaccgaccttgttcacggatgaaatcggccgaaagatctcgcgcacgaacaagagcgagacaggacgaggaggagaatctatgaatctactacactatggatctatgatcatatcatcctatcctatcccaacccgccatcatccatcccatatatcatcctaccacctcccagcttcccaatttgcattcacgtccacgtcctgcctcgccgccatgcctcccgctcaacctccaagcctcctcaacctcacctcgatcctcacccacctcctacccccgacctaccctctccccgccgacctcctctccaccccactcaagacccgtcagatttacctcccaccaccccaagatcgcaccatgcacgacgcttatatcagcctagatcctgggtccaggtcgaggtcgacgacgacccgagagatcttttccggcacggggtctagttcgagtgaagctaccacgtcaccatccgcttcgacatccacatccacatccacatccacatcgacctcgacgggggcagacgacgagatttctcaccgactacacctcatctcccagaaactccgtgatctgcaagaatccagcgtagacgtcgtccagggggagagctccgaatcttcccgatgggtcggcgagctcttgtacggggtgggccaggccgacgccgatggacgaggagacgggcgtgaacttgaacgggtcaccaagagctgggtggggtatcagaggaaagaccgggagacgctcttggcccggatagatctacgcgggttacccgtcggcgtcggcgtccccctgcatgatgaccgagagttggttgtcgggtcggagcatgtcgaggtcttcttgttgcatgaacctgtgccttctctctcggcgggaggacatgggatggttgaccccgtcgtacctgctactctctacccgacctccacctcgacggacgttggcgctggagccggcctagaggcggggacctccccctggaagttgttcgacgtcaagctcgtccccgactcggagcgatcccgtgcggatgtcggagatggatgggcgacggacctctcttccctgcaagaacccggctctcatccggcggggcgtatgggcgggatacagcaggaaggggaagacggcgagcccgagagcatgggcgcggatgatttctggggagggtacgacgacgacgacaaggacgacgacgctcatcaggcagaagtcctcgacctctccaccccgaatccaccttcctacccatcctttcctaccacgcaacttcatcccgcccccgaagaagaatcggatccgtactggcaatcctacaattcagtggaagacggactccgaccgagtaacccgcccacgccaggcgggtacgaggcttacggtgatgtgaccggtgggtattacggttcaggcgccagagccggtgggatgacgaggtccggatctggagcggggtcgaggacgcccgggcagacgaacgcggggcaaaaggattattgggggacgggcggggaaacaccggtaggatggtcagtcccggggctgggcttcgtcgccatgagatctcgagctgacgggttggggagactctttgatgattactcatgcaggtctccactcgtgagggaagccccgctcccgagcacgatggacgatgagcccgcgttcatgcctgattccctgcaacctgcccctgttacgaacgggctgcccctcacttcgactagcacgacgacgacggcgactgaacaatcgaccaccagcattacgtccatggacccggctcggactgctcgtcaagatcatctccgatctgccctccgtgcgctgaagggcatgtacggcggcggtgaggaagagtgggatcaggtcgttcgggagtttgcttccaagtagagcgcattgatgttgacatcagatccacgacctgggcggcgacattcgaacatcgggatgtggtcgcttctccgattgtgggactcgaacgggccgacattcttcacgcagtctccaacttctcgtctcacgagcggaactcgctcagtctgagcatatatagatggacatagaaaaagtcattacgggtgtcagatttccacccaagttgtatcatcttcatcatcagctcgcacggggtccgccgtagacgaccgaaggaccccccgacagccaagcgcatatcgcgattcatgcacgaaaaatcattgtgtcgccgacgacccgctcaatcagcccttgccggccagtttggcgtcccttcgtctccgcttgatctccttggccttgttgatcgcttgtcgctcaccgaaccctgaatcttgcatagcctgcgggtcgtgaaaccacgtatgagctcgcggatcgcgtcgaaacgctgcgaggaccacgctaggggcttaccaaatttgccaccctcctcgcggtcgagaccaggttgagcttttcgagcacgtcgtcttctggcaactccatctcctccaacgtgacctctgtacgcgatcatcatcaagtcaaatgtctatcaaccgcttgttttacgagcacggcgagagagcgaccactcactcgtcatctcctcgatccccttgaccagatcaacgtccctctccgtgacaatggtcacggccaacccgcccctacccgccctcgccgttctgccgaccctgtgcacgtaatcctcgcccgtcctcgggcaatcgaagttgacgaccatggccacctcgggaatgtccagcccacgtgatccgacgtcggtggtgacgaggacggggacctgacccgctcgaaactgtgcgagggagaggagtcgttggggttgagagaggtgcgagtggagtgcgaccgagggaatgtccaattcggtgaggatgaggtgtaacaggtgggcggtggcgcatcgttgggtgaagatgatggtcgaggggatatcttccacctgaacactagggccatcgtcgtctcccagcccctggacgccccgaccttcgtgatgtttcctcttggtccccttgccggcccgttcccgctccccttcggcctgacgatcgacggcccgtttgtgtcgaagatgtgcgatcggtttgggcggatgggtcaagaggtagtacaagtacggatctctcgcgtgtccagggaggaagaggtaactctgtttcaaccctgccacggtcaacgtctcgctctcgacccgatggacgaacggtcgcatcttgcccctcttgggttccctggcgacgagccgctcgatctcgtccgatatggtcgccgtaaagaggcacgtctgacgatcctcggggagttgttcaaagaggaaccccaggtcgggcgcgaacgtcggcgtcaacaacctatccgcttcgtccagtaccaacgtcttgacccgactcaggtcccattgcccgtgtgcggacgaacggacgagatcgaccagtcttcccggggtggccacgacgatatgaggcttttcacacatctctcgagcttgtttcatcatgtccatcccgccgacgaccgtgaccgtggtcagtcccagaggtttccctaggacgataaattgttccgcgagctgataagccaattccctgcgtcggcatcattgcgacgtcagtgcgtgtcaaatccatattgcaattcacccggtctgagcccgacgtgacctacctggtcggtgtcaagaccacggcaaagattccaaaaggatccctgacgatcctctgcaagatggggagtgcgaacgccatcgtcttcccactccccgtcttggcgcctcctatacagtctcttccttgcaagatgggctcgatgcatgccgcttggatctcggtaggccgggagatggcgatcgtccgtagagagctgatgaggcggggagagatgccgagcgaggtaaaggtggatttgaggatgggtttgggcgggttgggggtggtggtagctgtggtggtggaggagcgggaggacgggttgatacgggacagggaggaaggtttgatgtcgacaccgacgccgtcggtgtcaactttgcgtttaagcttggtggatgccgcgtcgggatcgacgtcgagtttatcggacggggaaggtttgacgtcggcgtcgtcctcctcgtcactatcgatcccgccatcattcaagtctggttttgtgtcctcctcgtctcgctcgacgtcgtcatcttcctcttcactcccgctgtcactatcctccccgtcctcgctctcgcccgaagactgtttgctgctaccagcacgacggctagcaccagcactaccttgctgcatcaacgccatcatgtgttgtcgaatctcatcctgatccaatacgcccgacttggtcgatggcgacgcctccccctcgctctttctcacgtcgccgaccgggtcgatctttctccgtttcctcgaatccacttgttttgccatagtggatggtggtggttagggttgtgtggttgtagggttgagacgagtgagcgtgtgtgtgttgcatgtcactttccaataatttccctcaactttgttcgcttttgaccgaaaaggtgacgcggaaacaaaaagttgaaagaggtagaactagaggatatgggtagatgtacatgtcggggggttgtcatgtcatcctacatattcatcatcccacacacgcatacacaaacacaaacacctctacactgacgacactctctcagtatgaacctcgatgatgatgcccctcccgacctcgttctcgcagagcccgaagatgcagctccgtaagctcaacccggacacccgtgaccccggcctatcaaacgatgactcatgcatgcactcgtccgtagcaacactcatgtcgacaggatcgtccccatcacactcctcacaggctacttgggaagcggcaagacgaccttgttgcagtacatcttgacggcggaccatggctaccggatagctgtctgcatgaatggcgagtttgcggcgcggggcgacacgacaagggaaatcgtcgttcgaggctgatcatctcctcgctttcgttttttgcttgtatgtggcttttctctgctcgattcatgggctatccgattcggactctcgactctcatcggatccccccggtttgcagatttcggggatagcacggatatcgaatgtacgtctggtcaagtattcacatcctcatccgtcaatccaactcacccccttgacctctctccctcttcggcctctatccgctcgatccccgcgcataccgccctatagccacggccatgtcgttcaccccttccaaccccaaatcaaacccgaccgaccaggacccggactcggacgacgcgcccgagacggcctttctctccctacccaacggctgcctgtgttgtagtatcaaagaacccgggatcgcggcgatcgagaatatgatcctcgagcaggaatcccgagctggggggtctttgggtcagcaggacgaggacgaggatagtgtcaaggggagtgggaccgggaatgctaaagggcggaggaggggagtggatagggtcgtcgtcgagttgaccggggtggcagatccaggcaagtccgggtccgacctcttctcacccgaggttcaagttgaaaactaaggcggaccggacaatcgtcttgcctttttccatacctcccattatacttctacctctgcatccatccctctactttgggttcatacccgggtttgctcgatgaccggtgtccggtgcgcgaacagccgagatcgcccgttctttctggaccaacgaggagatgggcggttcgttacgcctggacggggtcgtctgcgtcgtggacagtcggaacgtcttgaaggtgcgtcgcccttctctttcccctactagggacagggacggacatcgggaacctgcgctcgagatcgaccgggtgtgctcacgccctggaacttttcatagcaattggaagaaggggaagaatgtcaaaagtgagcccctcttcgtgcaaggaccccgagtcgagtcggggtgtaaagggaaaggacccgatattaatctgacctggacggcttgacaaccgtgctctagacagatcgcggcgtccgatgtgatcctgttgaacaaggtcgatctggttacggatgagatcctggacgacgtcgaacgtcgaatccggtcagtcaccacgagatacccattcagcgatcctttgacgggccgtcgttgatggtttttttgtggggcgatgaccagctcgatcaacccgacggccattttcaagcggacgcacaagtcggtgatcgatatcaagaacattttcgagattgggagttactcggtcgcgcccactttgaacgccagtcaactggccgacaagtttttcgatggggatgcgacgacgacggccatgacggacgggcaaggggttgggtcgggggcgagggaacggataggcaacttgcgaaacgagcacgaccatgaccatgacgacggctcgaccccgaccgagtctaaacacttgcgagcgatcacctcgctcgtcatcaacctccctaccgtcctcccgccatccagcctggaacgactggaatccttcctccagtccatccactgggactcgaaattccctggagatcctccccgggcgaggcccaacgagattgtagacaaggcggacgaggtagaatcaaccgaggggttcgagattttgcggtccaagggcatcttttcgttcgcgtctccaagtccaggcgaggaggaggtcgaggaggaggtcgaggaggaggtcgagatgcacgtcttgcagggcgtcagggatatctttgaactcacccgcctcgaggccggtcctccacgcgaaaaggatggagatgccgtcgacgcgggatccaagtcgtcaggccgatcgaatgggggaaagctggtcttgatcgggaaaaggctgggcgagcgtgatctatgggagaaagagttgttcgaggcgctgggagtgtagatctcaggaggtggcgagctaggcatgcatatattgatcagtgaccgacagggttgggagttcttatggtatgcacatcaatactagtctctctatctcccaacatccggaccgttgttcggtttcgtcgagaggcgtggttcaccttgcgtccattgaaagcgaagacgactgcgtgaaggctgccagctttcccttcggataaaccgggatgtcactgtgaacgcaggatgaccgagtggtctcatatggctgacaacggagatgtcatgattggatcgatccttacgactagcttgggagtcgtctccaattcgggaaaggacagcgtcagggtgatggcgatcgagaggactgccgtggatggacgtcaaaagtccctgaaagcctacatgttgctcctcatgcacacaccacgtcgatcatctggtccagcgccatgtttgaggacgagtatgacttgctcgttatcgtcaagtttgcccgtggtcgatcccgacgagcgggtcgacatgaaacgcgtgctcgacggattcgcttccgcgatcgtgatcatccgagtgagagcaagaggggggtgtcctttgagatggatcggcgagttgcgcgagtagccatttgaagtgatcgacgacgcagggaagcactttgatcgggtaaatgggagagcaggggtgcaagtgcgagtgatgagaatgatctcatcaatctgatcccatcaatctctttacattttgatcgtttcgagttcatcccgctcgtcgttcatcgatgatctcgatgattcgttgacgagttcaagtgacattgaacatcgacaacggctgacatggacaaccaagcaatgacctccagccagctcgacacgggaaaggggaggaaaaggatatatgaagggctttaccctcatgatcgttcaacaaactgcaagaccaccaacgactggcctcgaccgacattcaacatcatcaccgacgacggctgaacacatctcacctcctctttgacactattcatagatacaagctacgactaccacgacaccgacaacgatgaacacctcgaacgacgccatggccaactcgacctcgaacgctctccctccatcggcctttcatcccgctcgtccgactccacaccgtcgacccagctcggactctactgcgagcagtactgccaccacctctcctagcaccagacgtaaacccgtctcttacctctcgacagaggagattcccacgcactacgtcgtgcaccatcaagcgaggtccgggagctccaacaccttgtccatcgacacgcctcgggaggagaagcgcgaggtggaagatacccaacaatctcgaggggaggtggggccatttcaacccccagcatacgttctggaagtcgcactcccgcttcctacgcatcgagattcggaattcccgagccctccgacgatcacggccgcgggggcggtaaacaacgaaagacgaggtgtacgagtagatcgaccttctaccccacccccgacgtacatctaccctcctcccgtttcaccgagcttctcgatctctaccacccagcctactctcccgctccctacgtacacccttaccgcggagaccgaaccctcgacgctgcctcgtcagctgttcatgctcggatgtttcttccccccgctctgggccctgggggcgattatcctctgcgtcccgttgaaagtgtacgaggaggatttcgagctagatttcgagcgccggatgggcggggtctcgaccggggctggcgatgtggtagtacggggggtggcgcaggaggaggctgaagagggggtctcgagggtgaagaaacgagaacgagagttgttggacgaaaagatcctcatcctgcgtcgagtgagtctcagcgctaccggactcgccacctcgtccgacgaatcaaagccctgaccagcagacatccacccccctccatttgctcataggcggagattcgatgggctaggtactgcgcgatcgggttctcagctttcgttggatgcctaatcgtcgtcatcgccgtcgtcttgttcgtcactcggcgttgatcggttgtcagcttgtacgagtctggttggtcggaaaggaggagaagcccagagccgatgacgagtaggaggagcatcaaggcggtaaccggcattggggtgcgggttgcggttggcggaaagagcaggacatttcaacttgaacggcgggtcatatacagatttttgtcgtccagagcatccagggtgtaattgtcgtttcgttctccataatacatcttgcaacgtagctctgacccactcgcacctctaatgaccctgcccgccttggtgatcttcccatagtctccctacatcccccttttcccgctccaaaaccggacagacgacctcccagatcctcctctgaacttcttccctcgtcccactcgcatccacatctcgccatagaccgttcggatccgtcgtcgcccgcgcgttcccattcccattcccgctctcgacccgacgtttgacgagcttgaactgttccctgaccttgtcctgcaacgtccgactctcgtaccgttcctgcccaaagtctcccctcgaagaggtttccgacgtgggtagggagaggtaaagggtcaagtctggggaggggagggaatggtccggggagagcaaccagtcgaaagagaggccctgagacgcgagggatggttctccgatgtgagcacggacgagtattgagaggcacagagagagacagaggagggggggggcgtctatgatcggagggagggagtgagacaggtaggtccgggaggatgactgaccttggcggctgaaaaggcgatcccggaaaaagcataccggtcggcgatgatggtcatacccgccttgagatccctctcgatcgccgagctgcaccgtgaccccgcatccatatcgacaaacacccatatcccaagatccagaatgtcagccggctggtcacttttgagacaagagtgtgcatgtgtacacccccctgcatttggacgtcgggcggtactcacgcgcattcccatcggttggcgctgaacaacaggtgaatcgccctatcgtccatctcggtcgcgttccgaaggtaagcgtctatcatcttgccaatctctgttgtccgatctgatctagcacatcgcataccccgaccgagtgagcgaagttatcgagagcaacacacgagagagagagggagcgtccgtctcttaccgggaaacttttgggtacggacggatcctccattttcacgtagggctgcttcgagatgtgcgacttgggtcgttttcccgcatcgatcgagaccttcaaatacgatgaatgttccacgtttgaccatcgttgtcgtcgttgttcctcgtaatgtttgtatctaggagagtgtgagagagcagaagacgatacgagagtcttatcatgaggggatcaagagtagatgatgcttgagccagagtcgaagagggaaacaggaaacgtgtcaggttggacggggatcaccatcaccaccacgtaccacgtagctagacaagatcatatagattcatagccatccatgccatccaccatctacgttctctcgacagtttcctcgccttcacctttgtcacctcatctcatcatcaacgctcaataaaaaatggcaagcatccccccttccccgtgccgctcacctccactgaacttgacccggggctgacctcgctcgtcgtcacagtccgacatcaaccgagcagcttctccttcctccaagaccggcgctaccaccgccgtcgctcgtccccctggtgccaatgccgtccggtaagtccacccaatcgctcgtacctcccctcaacgacgacagaaagatctcacccggtcggcttggctttccccggacatccctacccatgggacctcgacgcagacgacgagcacccacggctcctaaacccaactcgacccgagcggccggagcgggcggatcaagcaacacgatgttgaagctgtacacggattcgggggagaacggtcttcaagtgtgagtccttcggggggtcttgcgccggacgaccacgtcgagaaagggggggtgtcgatggctgatttcgatgtcttaaatctcgtaatacttgtgctcgtccgtggcttcccctgctctctcgggttggatctcgttcgtcggtacatccttctcaacaccaccgtgaataccctcatctactatccaccatccaccacccatcccttcctctaaaccgtccggaactcgcccgaccgccaatcacccgttcccgactccgaccccacagcgacccctacgtcgtcatcgtcctcgccctcgtcttcatcgcctcgatctttttcttgcacatcaccgcccggatcttcaaggccctcacttcctagtctcggaatctggtcgggaccttcccgcttcccgcttcgagcttcgggctggggagtcaacttatatcacctcgccgattttatatttcaacacgcacggtacgctgacggggcaagggaggaggaggaggggggttcactgtcactggggaacggttgtataatagattttctcatcgaaaccctctttttcgtcctctgcgagtggacagacctgtggacggtcatccggtcatccggtcctcgggatgtaccatcttcgtctctcagacccgctggccgctggctcgttcttcatcccggcctgacgatcccgatatacagggggagatacacgacggccccgatttccaacatcgacggcaagatgatatcccgttcgacctcgtgatcgtggttactatagcgagagtcgatggtgctcctattcctcgtcatcgtgatcttccgatcccattcgcttcgcttccttctggtggacaaagagtcccgtctgcctcgcccaacgcatgtcagtcttctgcttggcctgaggcatcacttccggagcatgtccggtactcccagccgtcctactcgactgtgatcataattcgcgtaattcgggaatccttgacgcctttgttgactatatggcaccacgcagtcaacgatatgatcatacttttcacgcccctgcttcccgagccatacgtattcgaccaagaatctcaacaacccccgtacaggctactgtcagtgcaatgccgcgtttcaaattcgccctgaccccgacgtggagtgacctgtcctttcgcgacatgcgcctcgtactcggcgtttggtccgtaccccagagcctctctcgatggaatgcgctcgagtacctagcatgaatcgatcaggcagagctatcctgttcactgggcctcgttggtgagcatcgcgtgatgcagccggatgactcggatgtaggccgtgctgctaatgctggaaatcagcgtatgctggaaaaactcccccgtgcacgggtctgaaccatcggagatcaggcgttacctatttgtcctatctacagttcgtctgcgcccagtttgggtatatatgatttgaaaccggatttggtgtctcccattctgaactagtcgactcggctgggcgctcgcatggaaaatcttgtgccagctgcagtttggtatgatgaccgagctacagcatatttctacgcgacagcgtcatcccctgtaatggagttttctagctcggtcagacagggacatctaccagcgatggagcctgaccttgggcgactggatgaagatacgagacgggcgcccgctcgcaagctcgactattgtgctagatgtcaatgacttgaggctgcagcacgttccttcttgacttgccacttatggtgtttagaaggcacaagatctaccatgtgagcccccagccgagtctaggccggtacggaatttttcgctttttgctctctttttacatcgtttagggtcctttggtggatcaagaacggaacgaaaggctctcatcttggcacgaagtacaaatggatagacaatccgaccagaaattatacacgtagaaaagttcgactttgcaatctaccaaactgtttcagccagacttccttcgaactacagcgcatcgggatcttctttcctgcccatccctgccatgttcatgattgattcaagtcgtaccgtctttgcattgatggcatcacgctgagccgtcaaagacctgtcataccaagtcatcgcaattagcttgtgccgagcgcatcttccggggcatccatccaaactgaccggagttgctgctcaagatctgccactctctccttgccgccttgcttctcgaccttgatcatctcccctgcctccctgagacgcttctcatattccctgactctcgcctcccacttgctaacggcagtctggtgtctcgactcgtggctcgcgctagcttcctgcagggcggacaattgatttgccagggtggctgcgcgcttctcggcatgtgtagcgcgcgattgtagagttcgaacctcggtcgacgattcagtcgaagaggtcatcttcaaggtcgatagttggaactggagatccttgagtcgtgcctgtaccgcatcgaatagaatccggtcaggtttctgctcgaatgagcgtggtttccgcttcactgacccttagatccgcaacctcgtcgtccttcatcgtcaacttggtcttccaggataacttggtctgagtcatcttctggacagagtgttccacaccatccaagagtttcttctttgcgtcgagctcacgggacaaggcactgcccacgaatgatcaaaggcttggtcagtcacagttcaagggtagattgacagcaacgtacgaagtctgagattccagtctgatttcgagcgagcggatttgccggtcccattcagagttggtagattgtagttgtcgcagtcggcgtagcaaattatccttgagggtcgagaagttgctaggcacattgtgttcctaccaatagtcgttccagatcagcgctcgctcctcggtgagccccaatgcaagcctcacctcgatcccacacagtttggcgaccttgacataggcagattgaaggagggtcattgcgtctttctgtgccatatcgcttccacgtcggggagtcagggctcggcccagtccgcttccacgctccagctcctcgatacgctgccgcaggttgttgagctcctgttcggcttgtctggcagcctgggtaatcagaactcgcaagtcagacctctccttgcatcgacgaaacatccaggcgacgaaccttctcggctgcggtcagcttatcagatagttttaatcgctcctggcgttccgaagtcaggaggccctcgatggcgctcttctcttccgcctacacgatcgaaactatgtcagtatcgcccatctgtgacaggtagactaggcttaccatctcggacaattctgctcgttgttgcgaaagcgagctttccagccggtctacctcttgctgagcgtgctcgagatcgtcttgagagcggtcaaggtcccgtctgatgcgatcgacttcaagttggagagaccgtcggtcatccaagtgatcatctccgatccttctcttgtcgctctccaggctcttcagagcggtctgcaggtcccggacgtctcgatcacgctccgacatgcgctcccgtacgacttccacttcatgtgagagtcggacattactctagcagccgtcggtggttagtaagggttaatcatggccgattgatccgacttacttgttccttgtcactgatcagctgcttgtaacgctcgagctctgagctcaactccttgcgcagcctttgcgtctcctccgagtgcgcagattccgtgcgcctcgcagtgctctgtatctcgtcgcgttcctggacaagcttgcgatgcgagtcgacgtcatgacgatgtcggacctcgagatcccctagctttcgcgacaattcgtcgatggtcaagcgctgatgctcgagatcctgacgggctgcagcttccgcttccctgatctgaagcaattcatcttccatatctgctagattctgctcagctcgtcggtgtcagcctttgcgaaatagtgtagtcagccaatgtggctcacggtagcaagttcatctcgggactcgtcaactcgatcgatgtcagagtcggcttgtgccagctccgccttgaacgcgtctctctcccttgccatgacggagaggtcttccttcagctgctccagctgatcgagcgcctatatgatataggccttcagcgatgtactctacatttcggactctcctcatatcatcacgtacttcgtccaactggtcgcgagatgtccgcaagtcttcgtttctctcctcaatgatggccatggtctcggcgaggttctcgtcgatctcatttctctctgcttgtacacggcgaagcttgtcgactacctcgtccaagtcttcttggtaagcggtcatgtcccgagattgcgcaaggaacttggtatccagtcgatccagctcttcctttagtcgcagtatttcgttttcacggtcagacaataaccttgccagacgttcgtgctcggcttcgaggttgccggtgcgtgacacgctgcgctgcaaatcgatcgtctgggcggtagcctgctcgagctctcgcgcaagatggctaatgcgatcctggtcttgctggcgttgttcgtcccttgcctttgctccaagtcgcaaagcctctagttcggcagagagagatgccttgtcctgatgatgcctaggatcagccttgtcacgttgcgtttacgtcaccggatcgacttaccgtctctagatccaaaacatccttttctaaccgcttcacatcctcgacagctgccgggtcgaccttgttctcggcctcttccaaagcctgatcccgctcatcgaccaccttctctaattcatgctgcagatcttcaacttgatcccggaagcgatcattttcctctcttagatccgcctccttcacgcggagattagacaattcgtcctgtcaaggcctctgacatgagtatcgcgcaaacgcacaagcgaggcagacgagactgacctctagctgttcgagtgtctcatccccagggcgattatgcttggcctcgtctaaggcgatctccaactcttcgagctgagcacgatcttccgcccggagtctctgctcttcatccaattgttcctgtaattcctcgatcctgccaggatcagagctttgagctgcataaagttgttcctcgagctcgatattccggtcgttcgtcttcgccagcgtcgaatttagctccttggagatggtcttccacttgacaatctccgaagcgctgtgcgtctgaagcttgaggtagcgttgcgccaattccgccgcgtcgttgcccagtccggctttaagttgagcggtgagcatgttgagctcgagcttcagcttccaaatctccttgtcctgctcttccgttttctgcatatgatctccgcttagcatctagtcattctcgtacgatctacgtttatcgcggacccaccttggcttgctctcgtaggctcaactgatgccttccaccgacttccctgatgatcgacgattcgtttccggtcgtcgcgacagaatgcctgggtctacccttgaccctctccaacgcatccccacctccatccgtcgcccgtctcgtatgaagaccgacactcctcatcgcatcctcgttcgagatctcccattgcgggctgggttccaggtccatcctctcggacaacaggtcgtccgcgtcatcctcttgcgtaccgtcaccaaccgccagccagaccttgttcgctcctcttgtcgacaagcccaagttcgcttcctcttcgtatcggtcgctgcgtccgctcttgctcgtcgatgttcgcgaacgagaaggcctgacaggagtctgagtctgcataccggtgtcttgcaacatcgatcgtcccgccgccgttgatggtgaatccggaggcatatttcgtctgccaggcgtctcagaaaattcgggagtgctccttccgactattatcggtaagaaacgggaaacaaaacccagagtgagctgacctctgagaagggcacagtaacagctaacccacaggtccctccattctgccgcctgagctgttcatcctcggctgcttcctcgtcaaagcctgaagccagactccccatcgtgacatccgggatcgtcctagatcctggtccataggcggtagcgttgcccggcgtagccagacctggcaagatcctgccagacatgtctgatatgttcctctctgtccgccaaataatatcgtcccgctcgcgtcgagctgttcttgatgggtcgatcgccctgatttctacacgtccgactgggtcatcactgtttcgatctaagtcaagagtatatttgccaatgagtctcaaagagtcacgtcttgctgtttgtaagctacatttgacaaggactttcagggatcgcggactacgaaaggcttctgtgaagggtcaatcgggttgttttgatttcgtacttgaagagtttgttgacgatttcacgttggcgggtagtctgagctcaacatcaaacatcatcactccgtaccatcatcacccgttcgttatcgtaggtcagaggctcaggatcaccagttcgtaagctgctggcccgggacaatgtctttcggagccggtcaagcacgagcagatccaagaaatgaggccggccataatcggctcatataccagggaacacaggcatctggttactgtccccttgaacgaccgaacgactgactggcagtctgtgcctagggtgtggaaacgggcatgatcatcatctgcatcacacggccctccccctcgatccgcccatgatggaccggatgcaaggaggtacaacatcccgaaaagaaaccagagatccgtcccattcccgtaaaaaccagtcgagcgaggacagtaacgatccctgcctgcccggccgtgcctttcgcgggatgtcgtcgtttcctttgcttttggtcatcgtccacgacgacgtgtctctgtctcctctcctctgcttcgtctctcgtgtacggatcaattcgtttacttgtgggtagacttgatcttgaatcccttcgactgtggggtaggaagagcaacaagatgtcagtccgattatttctcgaccgactagagagactcggcacggtaatggtacgcacgctccttcgtccacgagccttctcgaacttcctgcccttcgatcggacgtaaggcttgcctcccttgagaggtccaccgaagtgcttgacggccctgagagaaacgaccagcgattaaccttccattccgttcgaggcccggtaagacatgttccaaacggtgactcactccctgacgttcctctttcccctcaacaagacggtgttgctaccggtaggagccctcaaagcgagctggtccaaggtcaaagcctcaccaccgttggcgatgatcctgtccctggcggaacgggcgaagctcaaggcggcgacggtgagcttgccgacctcggggagacgctcgtcatcgaggacctttccgacgacaacgacggtcttggcaccctgttggttcacagtatgcaacgtgcactcgtcagcttttccagtttccttccaccgtgcatctccttgagacccgtctaaagcatccccctcgtgggtcttgctcgacggtcctcatcctatcccaatgatgctcacgtcggcgttctggcccttggactccttgatgatacgcgagatggagatagggggtcggttgatcctggacataaagagcctcttgaggatggccctgttgaacctggagtcggtccttcgggcgaggaagcggtagagctgtcgtgtcgcaacaagaaaaaaagacaaacacacagacccgagatccgagatcaacgtcttgtcccatgattcgtgcctctttcaatcctctgcctgctcgacacgaaccttgaccaacaagaggaggtaagggtcctcactcttgggagcagatcggttgcccttcctgacgtggtggttcttaatgtcgatacccatctgttctcgtccaacagatccgtttccagccgggaattattacggattgtgatttgaggtaggagtccaattggaatcccgggttgcacgaagtttcagtagttatggtcagagtgtaatgtcgagtgggagattcagacgaaaagagataattttcaaagcaacgtaggtcgttagcaaactcgtgtcctgtactctcaaccagctgttccgtttgatcgaccgtccgggcagattctcaccttgtcgagttgtcgtaaagttgcccgtcctgagaatctcgtggtggtgcagacctcgttcaagcgattcgtcttggacttgatctcgtcgatacccaggtcgatggtggtctggcaatgggcgaggctgagaggactcaggagccgctcagcccagccagcctgccagccagacgagagggcggggaaggtcgaagggggagcccagtcagtcgagaacgagaacgctaggccacaggctcagcgagaggctaggggccggacgaagcgcaatcactaggacacaattgcgcttttttcgtgaccagcccacgcgcgacttgatcgatcgcgaacctccactttcaggtcgagacgcgagatcccctccaagtcggacttaactccgcctcaaggtcttcaagtctcacctcattcagtatcgtgccgtaaaccttgccacgccacagctgataccatggcgtttcagccgcggtaaaacgcctcgaaccggcaagtgctcgtcccgcagttcgtcatggtcgatgccttgaggtcggtcttcgacctttcatcgatttcgatcgtgttggtctccggaatttggtagaaacagtcgccatctcatcaaacatgcgagtgatcacgtccaacctccagcttgtcaagccatgccgcccggggttcttcgtaatcatcgtgagccgatgaccgacgacccgccaggtctgcaaaatctaccggatgatcggcagatacaccgctgagtcgaatcaacctcgtttcaatgaaatgttgcaagcaagaccctaagataagtagcggatctccctatataactcattcgaaagatccgccaggggggaccatgtcgtcgagctgaggcacgatacaagaccgtaatttctagcgtctcgacgcgttgttcttcctggcgcaatcatgtatcgcggcagcccggtcgaagtggtcttcatcctcaactcgacaatgtcccgtctcaccgatcatctctgatcgctatgccctggacattagcggtgcaccgggtcggccggaagatatcgcatgtcagcatgattggggaacgagaacaaagaagtcctgtgtggcgggatcaaatcgatgatcgtcggaaggttcgacgtttgcttctcgcttctcgagcggcctagccaagctgactgaacgagaaagaccatatatgatatacaccatacaccatgatcaaagcctagacgacattccttcggagtgttcagaaccatagccagatccctgaatatctcgaaactgatcacgacatgtcccaaccccctcatttccgccccgagaagacgccacaatggcgaaagatgcgagcgttcggaaggcgactcgaagtgaacgggtaagcccacgttcatgaatcgaggacgtcgtcccgtgccattctctgattcttgttgcaggtatctcgagccggaggaaaggacccacatcaaaaggattgtggtcataggggggcagtcagcgggcaagagtgctctggtctctatgctgaccggggtcaagctcgagagttcgacaaaagccactactcggtgattgccattgtggttggcacaggaatacatactcactgctcctcccacagcggtcctactgtatttcggttcatcaaggggaacgacaagcaaagttaccagatctggcctgaatttgtagaggatgccgaagggaaagctctatccgaaatgatcaggggagaagtggattactgtcgggccgaagacttgccggttaagatcaagtgtctccatcgtcttgttcttcgtcccgagtaagtactctacagctctccgctcatgtcatattaacaattgacaactctattgattactagattcgatgcaggggattacatcgactccgaggagatccccaccacacaaaggcttgcggatatcgacccatctttcttcaccaagaaccgagtggtgatagaaaagagtggtacagatatgccgaaccttgaaattgtcgacctgcctggacttcaagtatccagtgatcatccagagatgctgcgcaagatcaaggctatgactgaggaaaatcttaaggcaaccagccacacctttgcgataggcgtatgtccggcaacatcagaaccagagagtcaagaggttcctacaatcatcaagaactgggacccgagcatggccaagactatcagtgagtattttgatgtgcatagtagccggctagataaaatattgaatcagcgtctcgattagttgctcttagccgggccgatgagatgaccggagacgagtgcgcttggcaagacatgatgctttgctataaggattccttttgtttcgttgcatcgtccgttccatcagggcttctggagaattccagttcactgcaggcaagcgagaaacaaactttggaaaacatgcgcttgtcaaggacaaactatatgcacaaagttcccaatctcttgggcatggggaatcttgtccgactgatgcttaaaaaatgtccaactcggaccaatctaggcaagtcagcttttggctattcctttatcgccttgttctctttattccccgcttatacattgtgtttttgacatcttcttgctcgttctctcgaccctcatgcaatgatccagacttcaaaccctgttcaacaagctggaggcagagcttgatactctcgtcgtccagcagaacgagcaccaacgggacgaaatcattggcgagatcaatgcacacgtcgatcttgctgctgaacagcttcgcacggccattattgcatttgaacagtcgtcagacttgattcgggatcgccgctgcaccgctttgagtacaagactcaaagcctgtgtcgataaagccgaattgcaacaaagtcaagtcttcgctagcgaggcagtctttaccgacgttatcattcagatacaccagggatggaaagctcttgtcgactcacatcaagaacaggtatgggccggtgtcctatctcacatcgaaacatccattcctcgttccctgcctcaactatcacacaagatccggcaggcagttgcatcgattatcagcaccaaccaaatcctgtgcaaggattttgttgattcgctgtgtgcacaatactcgggtcatctcgacgtcatcagatatgatgctgccgcagatgcctactacgacagggaattccttaccgctaccgaagatgcgccggcgacctttacgggactcttgactccccccgtaactcccccaaagcgtagcggcgatgttctagtcagtggccgacagccgcgtaaccgtgatctccgagtcagcctccagcaggatctagctgtcgaacaagctcggcaaacaaaattgtaggtcgatgctagtcttcagagatttgtcgtaggtaagtgcacgaagtaacccgtctctcaaatggtatattccaagctgagatttcgtttggttaccaggtgttcaagaccgcctgagccactccattgcttgcgtggccgggagatacacttcgaatctctcccacttgatccgcgacaaggtcgaaaccaacaaagtgcttactttgaaagcggccgaagcgatcatggcggcgagtccggaagaagttgccgagcgaaacgagaagatggtcaagctgaacgagctgattgccatcggcaaacacgctctcggcgaggactagtcgggatgaaaggagatcgcgagtaccgaaagaggtctcaccgggcatatagggactgggcaaaaggaatacgggaaaagattcggcgaattcgatatactcttaatataggtccgatcaagctcgtgaatgttacatgtcgtcaaaggagatctttccgcatattgatcgatgctatggctatctcggacgtctactcgtcatcctcctcatcgtcgtcgtcttgagcttgcaagaactgttcgaggtgggggatcgtaagcctttgaacgactttcgacgtctctgatcccgtaaaacgagcttaccttgacgagcggttcggcggccttgacaaagtgtcccttgccctgagcggaggctcccttttgagcccagtaaatgatggcttggtcggagatgcaatcctcgttgtagaggactttgaggatctgaggaaaggccttgatgatcctcgtctcggtgtagcagtatacctgcgcagtgttgatgagcgcgacctgagccttggcggtggtgcagaagggctccatgagggaagcgtaggtctgaataacgcgatatgccgattagactcatcgactgcatcgcgttgtgactgtaggtcagtctcgagagaggacttgccttgatgttcttgagagccaaagcctcgagctgttcgggcttggcggtccagtcgacgtcggccatgatggcagcccagatggcctggagaaggtcgacttccccaatcttggtctcgttctgttgagccttgacgtattcggccatctagagtagcgagagtcccaaaagcgccggagggaatcagtgatcgggtagagggggacaacccgaagatcgactgtactgacctcctcgacactgtcctcgccgcctcccatcatctcggtcagcctgccgaccatctcttccctgacgacctttctgacgctgttcaagtaccagtcgacgactccgcccaactcggcctttttaaagtgttcctcgagacgctcggtcgtcctgagttgggaggggaatacgttgatcaagccgagcttgtcgagacccgacttgcggaacaagagggcaaaggcttcgatagtttgggggttgggcgaagcgaggtagaattgaatgaattcggtgaggaaggtgagtccgacctctatcgacggcaagatggagaagaacttcgttagcggctattcgctcagtagactaccttctgttcgagctcaatccacttaccatccttgacgacggcgtccctccacagactctgcagacatttcccagagacgagaccctcggtgacaaagcatgcggtggcgtaggccaacttttgtcgcgaaagggggtcccacttggcgatgctatggcgaggcaccgggagcgaggacgatcagcaaaaaaggctgcgggagggggggatgtttcgcaagcggatcggtttcgaacgtactatgcgatcaagctgggcagcgagttctcatcaagaggcttctgaaggtacttgtacctgtacaggcgatcgatcacgaccacgatcacgatcagtgatcagcctcgaacgaaagctcgcaacgcgacgagaggcttacctctggatgagcctctttaggacatcgacgagatccctgatctcctttttccaatcaccctgatcgcctgccaggctctgatcttcgtcaccgatatcggcatcccctaatcccgtccccttggtcctgagaatggcgatcttgctcctcttggtctcgtcgccagcggcatcgaggtagctaccacccggctggaggagaccaccacagatgaggagttcgaagaatgcatcgctgtacttgaggagttcgagttgagatccagcgaggacgagcttggcgaggatctggtctggggttgcgtcggcgggaagggagacgaggtaggtaaggaggttgtcacggaaggctgttgcaggtcgattcgatgatcgatggtgaacgaggtgattcgacgtcagttctcgaacggcagaccagttcgtcgagggacgatgggcgactcaccctcgggctcgaatttggcggtagctctggcttgaccctttctctgcttgatcctcacaccactatatccggaaatttagatcagtgatcagatcacggtcagaggagtcacgcagggcatcgcgaccaagtcggctcctcgctgcatctcgctggataattcggactcgacgcagccgatcagggatatcatatggggactcacgttaaagacggtttggctgcattagcttgtgtctgttgtgcacccggggcttgttgagaagacataagctgtggtgtgtgaggagtcgaaggtattttctctgtctcgggactgaaagggggcggtacgagagccggtagtgtgaagtatctccttgtcgagcgaggagcgtagagagtagagagtcagagagacgatcgagtagagtgtaggttcagagtgataatacctgatggtcgaggtctatcacgctcactgctctatgacacttgccaaacgttcgcttttggttgatggtgaaaggtgggtgacccaggcaagagcaccgcaacaacgcagccaaaggtggagcgagcgagcgagactagctagcgaagctatctcgcgcgagagagaaggggcccccacccttaatgtcacgcatgcatgacggctgtacgcgatcctcaggaccggattagcagctctggatatgatctccaagatctctctcgagcgtaacgagatccacatgatccccctcgtgagtaacacgctcggcacgggtactgacaccggcaccgacaccagcgctgacatcggacgtcatcccacccggacctgccccgcccagatcttcctggacacgttgtatcatttccgggagacgaccgagctcgcccaactagcctctgacacgtacctcgccccgctccacacctacacgcctctccactcgacgacccccgcagatttcgaacgacagtacggtgcgcggttatgggaatccgatgaagagtcgtacgactacctcgtcaaggtcgagcccgcccaacgcgcctactcggaactgggcgtcaaggccgtggtgaccggtcgaagaaagagtcagggggaggagagggccgggttgagcgtgatcgaggtggatgagagggggttgatcaagatcaaccctttgatcgagtggagcttccaacaggtcagggagtacatcgataaagagtgagtcggcgggggtcggtcggtgtggggcgcgttgagtgtatggaaccaggtcggagacgaggctgacgctacgtatcgcgtccgtctttcacaggaacgtcccttacaacccgctcttggaccagggataccgttccatcggggactggcattcgacagccaaacccacgacgggtaccaccgacacggacgccggggaacgagcgggtcgatggcaaggcaagaagaaatccgagtgtggtttgcacaaggattatttcgagatgaagcgggcgttcgaggagaaacggaaagaggccgtcgaggtcgcccaggagaacggggtcgaggtcgaggcgtgacgcgcgaaggggtcgttcacgaaagtgaataggtgggcgttgtaagaacaactctgtttagacggactgtatcggttgtacacattcgattttcacttttacactcatatttatacatatcgctagatcaaggcgaagcctgcccttcgttcaggagctcaaatgcaattcgattcggcccggcgtgacgactcgatgcgctcgatatgtaggactatgagcgattacgaaaagacggtcaatcgagatacatcgtccacctcgcatcctgcgcttccctgatcaacaccggccagggaggtagacccccctgtgacgtccacttcctttgcccttcggtcgactcgactctttgtacgcgcccgagaccgttcgtctcagggccgaccaccgagctcacaaaagatggactgggcggcacgtaccctggaggacggttcgcccccgccacttggggtagaacatcgctttgcctggacgtctgccagtcgggcgttatgacggggggtaacggcttgtctaatcgataaggcgtcagtcgtcttgctcttcctgttccgggccccgtcggcttcacgtcgaccgcaacatctggcggagcgaatggcggtccagaagatgctcctgagtgaggatgagatagaaacgcattttgctgcggtaggaagtgggattgagggccataacccggaggatcgggctgtgcgagccggagtcggagcgcggtaaactctggtcgtagggttcaatcggcggtcgatccacgatgatttgtgggggtaggtgagcggatgggggacgctgaatccccccttgcgttgacggtaaactgacatggcctcgccctggtcccgcagactcgatccgggctggttccagaccgcgatgttgccactggggatcttgtcgatcgaccatctccctctcactcattgttatccttgcgccccgcttctcctcatcctccattcttttgcgccaggcttgacgtttcctagctttgaccagacgacagatcgtccaagagatcccgaccaggacgagaccgaggacgatggcgatcgggatggcggttcgacgggagatatgaaagtctgcagacggattctgatgggtcagagtagcatatgcttggagtgattcgcttgaagagggtacgacgatgtttttcgcaccgaacggtgctgatgtaaatgtttgcgtcgttgattcgtcctggaccgagttcatcgtattggcgacagtcatagcgatggtgagtaaaggaaaaggttgatctcgttgactgacgtagctctggatttttcgcttgtcttctgtcgaatagccggaagtgtcgttgtggaacagacagagttccgtcagacatcaaagtaagaccttttacaccaatggtgtctacgttcgatcttggcgattcaggctgaaacgatcacgcgcgcgtcaacgcgtcaatgaaagcggcggcgcaaacgctgaatagtcgaatcatctcgaacggacaccgtcgtgcagctgtagccacaatgagacgcagtggactgctcagtgaatgtttaaagcatgatagtgcgtcagtagagttcgtcttaccatgttggacctttgtcctagcattcaaaagtggtacaaagccccactcggaagcgacgccgccgtctcgtcttggggtgtacggaacatttacttgtggggaggaaaccggagatatccttcgttcgtcgctcgtctgctatacgtcgaaattcaagtcaaagcccaggattgtggacctgaacaagtctcgattaacaccggcgcccaggggatagcatatgtaatgttgattcaaatagcttccggtgtttcggatgcaaatcgtggaatcacaaccgtacgtaccatccgtgcaaaggttgatcatcatcagctgaatgactttgagtgtacaattgatcactgccctaattgagagaaccgtgtagacttgcgaccgttacagcctgcttgtttgtcctagcgttgaacgattagcttcagaatgtcgatcaacacgctgttctcggccgggaaccgccagatgagcagtatccagcgggatctgcaggccatggaggccggggacgatggtgctgctatccaaggtatgtttcgagtccaccctgtatagggtatcagacgaaattgacatgttgactgattggttgatttgacaccgtactccaggccagatttctacaaccttgaccgcattttcacgcctgatagacgactattcccgccaagccgcttcggccaacacccctgccgataaacgagagaaagctcaacgtcgagcccagcaattcagggaagaacataccaacctgaaaaacctctttgagaagcgaaaacaagacgccgctgagcgttctcgccagaacctgttgggtgctgggggtagcacgagtgtcaacttgggtcaagggtcgagaggaaatctcggaccgaggttgcgtcccaacgcacccaacacacctcagggggagtcattttcggaatcacccttttcgggagcaggcgggagtgatgcaaggacggattacgctttgaacgagcatacgttcattcagaagtcggagaacgctatcgacgattacttgatgcagggaaaggccgtgttggacaacttggtggaacaacgggaggtcctgcgccggactaaacgagggttgcgtggagtcggagagacgctgggtttgagtagagagacgattggatgggtggagcgaagaacgtgagttcgagtgatgagatctccattgacaacttgctgaggcgactacccggaacacagagcacaagactggtggattttctgtggtggagccgtcttcacgctcgtcatgtttggagtgatataccattatctgggatagatgtgcgcagctcgcatttgattctttcgggcacgcgagatgcgtccacgcgttgtaaagatataaccatgtcattgcctagatggtactgcatgccagacctgaagccacctgaaagttcagaagcgttcaagaggttcaactgctgtcatcgagagtcgcctgtcgtttcttggcattgacgatccttcatacatgtcgtgaatggcatacaagagtcgtgaaatcgaggtcactaagctcagctactattgttgtcgttactgggtctcgtcacggtcgaatcggcgatgcgatgaaccccttcaccttccccacagcgttcgtcctgcatcgttcgtctctgcgagtggtgtgtctccgtcgtcaaagctcccgtcttgacttgcagcttgactgataccagaggctcgtctcagcgaaaatccagacagccaagagcttttggcagatgcaggtggggatcgtgtgggggtattcggggacgccgcattgccctgagcttcataagggtcaaggtagcgtttaaacgtcggcgtgaggggtgggccggtgtggctgggcgtccgtttcggatgagcgtaaatgtcttgggattgaggctccgagatggcagaatctgtatgccgtcgtagccgttagcttgccgtctttgcaccgtgtaatagtctatacatgaacacccacaagaggtccgattaagcagcttgttgacgttagtgggtcgttctggagtccgttctggtctgaattttgcatccgggtcgatagcgctcgacaatgcacgaggcgatcgatgttctgactccccttgagtcagcctgatattggcagcccgctgattgagcttgagccacgcgacgaagtcgtccggcagttgttgcagttgtctcatggttcggatgttataggccatcggtctcgatgaggaatagctcgcgggagaagacggtcttccgtcaggccggccctgacccgagctacccgataggatattcatgttcttgcttgccgtagggactgctgcaaggtattgttgagacgggatggcgaacgggatgttgaaacggctgttttcgagatcgtctgtgctaggtttcggtaccgtgggatgatattccgagagtccgatgtccacatcgaaaaggctatccaaatttgctaccaggcttgcttgtgcctgacctagtgactctggcgataacgcgcgtgacacttgccgttgtgagacctcccgttggataccttcaactccctccttgacgcgcttcctgtcccaatctcgtaccaattgctgcaggtactgcgagcattcttcgctcatcctcggttcgttcacttcgtggcgataatctttgaccgccctgcgcagttgcagaggattcaaagcctgtagttggggtaccgtcgccaccaacatgtcaaaatccgatagctgggacgagcattgtagccactgggaacatgagcaaaaggtaagccgggcgccaaattgctactttgcctcagtatccacgtacctgtaatagctgtagaatccgctcgaaatgtttcgtatagagagaggaaggtaaagaactggccttcacccactcggcaaccagctcgaggttcatcttaatttgcaaagctttgctccgagaaaggtattttttcccgcccagcatgatgccattgaacatctctgcggccatccagcaaagaagttgggaaaagatctggatgatcaatgcaggattgatctcataaagttcgagaatgagcaaggtgccagagagtatatcgatcatcgttgccggtgattccacgggctcggacgtgaacataggggcgccttgtcgtcctgctcgagacggtgtggcagtcgcatactggtccgctcgggtgtccacctgtaacaatgtccggttcccgcttctcccgccaggcgaaggttgcgaaaatcccgtagctgaggtaggggagcctggcgaagctccgaacaagctggcgacatgcgatgcactagctctttgcttcttgcgaccggtgaggcttttgaagatggaccattcatcatcgaactgcacgtcctcttcaatcgtctcacaatctagcattgatgaatccaatactcggtgcatcttgccttcgacgcaccgaataatgtggactggagtattaccgaatggagcaggcttttaggcattattgctgcaagccgaaggaacatttccgcttaccttgcatggagttcagtatctcacgaagcattctcaagagatctctgtcctcacacacgtccgacatgacggtatcagactggatcaagtagatcagaatggtaatgttgtaggtccaaaaggctagtataggcagtgaatcggctccactctgatcaataaagatcggacccgtaagccacaagctcgtccgatcaagatcaaccgaccactcaccagtgtcacctcttcgatagcgatgctcgcgccttccagaacacaatgcaagagatccacctcttccgcacatcgatacgtggcgtatcgtgctagcatgtagatgacgttagctggtagagtccgtttgacgacaggatagcactgtggtgcatagtttgagatgacaacatccaagaggacattggtctgcggagcgtctcccgcgatgaaagatgatccgtcgatctttttcagtggctgtgttcgtcagtgaatgcgtcagtcccgctcgctctgtataaccaaggtagcttttacgtactttacgccgcggggtctgcaaggtctcgtctcccgtcagcccgtcatcagacgttccgtctctcccagtaagcatatcggctccatcgcgggctatgccacccccaaagacatcctggccctcgccagtcgatccgtctaggaggtcgtcaagcccatgaaactcggccatggtatcatcttcgtcttcttgagtgtcctgatcgtcctctgagctctcttcggtgtcatcgtccatcatgggaaaacgctttacgcgtagctgtatatcgtcccgagtccatttggcctcatagttccgcatcaaatacgccgcttcgtcctcgcccagtcccatgtttaggagtctcatcctcactcccaaatcgacttgctcgtcctcaatccgtttccgatctcgtctcgctgatctttccttggcagcacgcttcagtcgtcgattccgttccagagcctgtaagcgccgatcccgcagtgcggtatcctgatgctccagctcattggcttcctctgtagcgatcgagaaattgggcgaaaagttagtctgcggggtcgtcatctcctcacgcagattacttggtccagttggtgaagtgacggccgaagcgttcggatctgggctgatcaacgctgctgcgtccccgacaccattcagcaggtccgtaacgtcttctcgtcctggcatgccctcgacgatgtctagagccgtcaagcctttgctagttgtccacgccgtgctgcatcctcgtgtcaacagaaacgagaccaaaggtgggctagctagcagagcggccagatgcaagggtgtccaaggatgtgctggatagcgaatgtatcagtcaatgagccatttctctgatacgggttccaagtgaccatgaacttactcggtatgaccttgccgtactcattcttcccgggtggccacatcacgccccatcgaccgactagcgtccacaccaacatctcccttgcttctctgcccgcacttgcaacaatggccatcccaatcacagtatggcgatcttcatcacggaactcatgaacgatcttatctaagacattgccctgatgagcgaatacatgcggacccgttgatcagctcaggcaaagtaatccaaagactggaccgcttcgagactgacctcctcaccgctcaagcttacgagccaaagcaagatatccgggtcgaacctcaggatactccattttagagcattcagtaagccacacttgagctcttcaacggcttcttgttgattttcgctctggctatcctcttgggtagcatccaccagcctcagagggttcgaagccagatcaggctgcctggctgtcgcattccggtggtttgttacgagctcttctagagtcgagatggtgggaggagatgaacgcttgaaagacgacctttgtctgcgaccatacggcagaaaggtgacttatgagtgttgtgcgatacctcagtggacgaatcgacgaacctcccgataagcggtggacgcgcagcgacccgtggacgttcaggcggagattggctgttgaacaatgacattccttcttctcttgagctatgctaccttctatgttagaaaacgttcgaggaacttgtcggcgtcgtgttgaaactgtcgtgagatggcgtcttcagaccaaaagagctcagaaccaggcgtcgtgaaagttcgtgctttgtagtcctgcttccgacctaatcttcccaggagattgctatatcaaagtatgctttcccctcatagcaggatttcagcgatgagccagattttcagtactgctaggacgggcatacaggacgtctatccaaaaacaagaagaagttcatcatcaaccgaagtatctactccttgagagatgctgctgctgaggttgaatttggttccgacttgttattgttcccggcacacgcgacctcccaagcctcgatattctcgagtcgcaccgatgagcaaccatagagtaggcacccatgtatggccacttcctcgaatccccctctttcgccaggaattccatcgagttgaaagagagcggagagcgcctggttccatgcgaccagtctttttcgtagataagcggagcgtgagtgtttcggacacctgcgcgaaacccgatcactcgtcgtgcgccatcctgcggcccgtttgatgtctctatatcgctggcagacgtcgcagtggggagacatctctcagggaccttgtgcgggtcaaacataagcgtaaatagcgatgcagtttcatgaaaggagactaaggttctcggatgatcaaggctttaccatcgctcgataagccatcggcgggcgacgccagcgattgctgggaacgcacttttaatgaggtgcctttgatcacccctgaggtaatcaaatggtctctttcggccgagcattccgtcaaaacgttacgtttgcagcatacattgagcttggcagattctcgatatgagcggagttggacatgtctacaaatccgcctccaggtcggattccagcgaccaatgtgacctagcttactccccccttgtacggcacagcgcgcggcaacatcgtcatgcgagctcggtctgattctcagcttgacttgtttcaatttcgtttggaggatcaaaggaatgtgggtacaggataagacgttttcgacggctgggactgctgtcctgctggtcggagggattgacccgaagccgaatgaattccaaaagcatatataatcaagtttccggaacgatgctacggtcccggcgccgccgtttttctttgtcactatcatcacgattgccattgttatcatcccaatacagcgaatcatcccacctcaacttcttgcctcataatgtcaaacaacgtcactgacagaaatcccaatgccgtcatgagaaaccagatcccaggcgaacgtggatcaggcggtagtcgcagaaagaccaactctcaggacggttgcagtgagcgcccaggcacagtcctgacacgctgctcagctgattttgattctcgccacagatgctgacgacgagatcgctgtgatgactggacttggagcagatgaaagcgacccgagcacagccgttaatcgagaattgattggaggcagtctcagaagtgtatccggtaatcaatcccttgcaacggacgctagtagcataagccacccccaccatagcgctacaagccaggaaccgggaggaagaacgtgatgctgtcttgatgcaacgtcgtggtcaattcctagccccaaatcgcttgtttaatgctccgctggatatagaacagctgaccaaacaaccggacggaatgtgagatctcgatgctaatatgttatagtcgctgtcatatccgtatccacaacactgcttgtagagagttacatggatgaaatcacttgacgattttacctgagaaaagagtctatccagaatcacgaagttttcatatcgatcgattgcctaaaagttcttgatcttgtagacgatcttgtccttgagggtcatgccgtgaatggaatcctcctcctcgaactcgttcaagtcgtcaaactctcgtccaccagtcgaaagatcgacctcgtaagggttgaccaacttggtcttgtagatgactgcacagtggaaaacaaagcgcgtcagttggaagatgatactggcgggcaacgaggtcgtgagaggaaacgtacacttgtaaccgaagtatccgatgacgtagatggggattcctatagggatcggtttcgaagttagaatgcaccgcgtggatagcgtgaaccaagtcggaactcaccgatgtagtgggtgatgaacgacttgtagttgaagggcatgaaggcatcgaaacccttgaagatcgagagggcgacggtaaagaagagcgcaatgtaggtgaggtaaggctggagaggagccttgtaagggagagtgtcacgcgagattccttgagccttcatggccctctggaaaccgatgtaagatcccaagatggagatccaggtaagggctccgaagatggtaacggcggacacgaagtagttgaaaacgacgagaccgtctacgagcaggtgaaacatcagccacagtatcctgatccaccgtcaaagcgaatcgtactcaccagacgaagcaaccagataagccaatcccatgaagcatccggtaaaggcaaaggcgacgtaagggacacctcgcttggtgcacctggcaaagatctggggagcgtgtccgtcacgagcgagaccgtagagggttcgggaagcgatgtactggtccgagttggcggccgagaaggtgaagatcaagatgcacgcgttgatgaccgaggggagacccttgattccggccgaggtgactgtgcgccgtgtggcggaatgagcgcggaatcgcggctcaaagcatgatgggttactcactggcaacgacgaaaggcgaagcgctagctcctccagcagttcccttcttagcagcctgagcgaggagaggactgttcattcgattaccggacgggtcagcggcatgcagattgcaggctctgtgcggaaactctgactcacgacttggagtcgacgatcataccaacgatgaggacaccgatgatgtagaagaacaagatacgccactgaaacaaagggcccccgtctcagtcggaagctctcgccttgtcatgccgaacccgttccgactcacgaaggtcttcttgatagcgctggggacggtctttcggggattcttggcctcaccgacggtgactccgataagctcggttcccatgtaggcgaacaaggccaatacgagggctttggatagaattcaaacggacaggatcaatcgactgctctttgcatggaggtacacggccgacgctcaccgttgacgaaacccaaaaactttccgaggtcaccggtttccttgtaaggcaagaaagccttgccgttcttccagtatcggaaaccgagacgttcttgtccgggaacaccaccgagatcgatgatcagactgaggagaggatgacgatgttaggaccaggcgctgcacgtcgccaacggcggcttaacttacccgagcaagatcaatccggtcaaggtgagaatcttgatcaaactgagccagaactcgacctgctcccgcatgggcgtcagcacaggatccacaaggaagcatgaaggcggaccgcttcgaacgtacctctccgaaagccttgattccgaagcagttgatagcgatgacgaagaagatcaagatcgagacccaagcggccgagttgatctcggcgttccagaatctatcgatcgcgacgcgaagagatgggacgatgagtcgtgggactcgacgagacggtagcgagacccgacttaccgaataacgagagaaccggcgatgatctggttgggcgagatgatcaagtacttgcagaggtagacgatggcagtagcgaaaccgaaagcagggtcgacgaatcgagtggcatgaccgctatgaaaagggcgcgaagaggctcgaatcagtggcgatcgtggggtacgaacaaggtgtctgccatgctactcacgcgaaacctttcttggaggggaacttggtcgacatctctcccaaacccaacatgacggcgaaacagacctgttgatcgagatccggaaagtggcggtgggaggtgtatcagcgcgcgtgacaaaggtgcgaaccgatggaggccacgtgatcgcgtgctagtagagttgagggagagtactcacgatacccataatgaggtaactgatgaacagacttcccggtccgcttcgagcgagcgaggtaccagatccaatgaccaaaccggttccgatggcaccaccaatggcaatcatcgagatttgtctggaaaaatcacccgcgaaacccgacccggtcagcgtgttgttaagaaaatcactgtcgacccgtgcgcggggctcacctgggcttgagctctcgcttggtctcctccatacggggctcggtgtcctcaccgataggttcggtgtacccataggcctccctcgaggggtccatgacaccctccttgccctggtcatagttcttctcgtcgtatccagactgcatggtaagatcgatcctgatgatttggtcttgaaaagggggggggaaagggggcaatcgatctggattatggaaagggggggaagtcacgcgcgggtcggttgttatatatgtcgagctgctgataggagcctgcggtctcgtgagctggatccttatcgtggtgagaaacgacgatcgggacgattgggttctccacaacgaggagcagccaagacagtgcagggggtgttgcaatgaatacgttctgtcgcttattatcagacagggtcagacagggagcgttgggaaacgacgacggctaacaaattcaggtcgggagggcggttcgcgagtatggttccgctctcacgcaaaagacctgtttttcgaatcggtctgtggtggtcgaaaaaaagagaagaaatctgggcaatgatcacggggatggcgaggattacgaggctaccggaaggtcccgctggtcgttggcccgtatcgacagatagaggaatcttcacgagctgccctgggcgctggccgctgtcgtgcttcgatcgatgtatcgcgcccgcatggggccttcacctcgggcagatttgggcttggcgagatcttccgttggtcaaggcgcctggccaggtcaccgcagctcgtgcctcgcccgccttgttttcgtttcggagggtccgatctgcctcgcccgcgtcacagctcatgaaaatgtcagcagcataattcgaataaattagaatccgaccgtcggcgtttcttgttgcggatggtcgggttccccgcgtcgtcgtggggatcatgatcggtcgtaacggtctcgtgcatctttgttaatgtcggagccgcaaagtcgagcattttcgtctcgtggtgtacggctgcacatcttgctctagtgagcatatccgaaggccaggattcgccatccaggcattgtaccacttgactgcgccagtcgacgatatatccgtgtgtgaaagcgcaacttgcgcctgacagaccggccgtcatgcccgatacgcatctgcctacaacatcctggtccgacgcgtagccttgtcatacagacgatagaaaccactacgccttgcctctcacagctgtgcagtcctcgcttgctgtgataccccagagaatggcgcagtctctgacgatgcgggcaactcgctggacgtcggtcggatgattcgataacaaataaacctccgcggctcgcgtttttccccgcgttcgtgaatttgtccactcgccccctcgcttgaagttcgaaaacgagaccagacgcgccagacgattggccattttcgctcgctacccagccaagcggaaattgaagtgacgtggtagatgtccgaattgtggggatacacggggcaaagatgcgggggaaatcggggtcgagaagaagcaaggtcgtcgttcaaagatgttcctcgggccgggtaggatcatttgcgtcgaacaaggctagcaacacgtcaggtgatcaactcgttgacttcgggtcaagcatttcctgctcattggctgcgtctattcgaccaatcgcagcgacgcaatcatgcgcgagtacacttttatttacgctacatacacaatatgctacacgaactacttcatgacattgagtgtgtgacaagccctaaacaagtgcgactctgaaactccggcgtctttcatcggatagattccacttcttcgtcccagataacaggccgctggttctcggccctgtggagataacattctgtgggtgccacgaggggtgaatcgaccggaagagaatcgcgacgtcagagataaggagaaaatcacccgtgggtacctgtcgcgataaggatctctcaggctcaccagtatcaccgtacgccctgccctgtccccagccacagagatattcggagccgttgataacggcccaatctgttcgggttcacacgatgcgctaagttatcagacggcgatcttgcgagtggacggagacggccggtaacgtccggttggaaaacaaggtcactcacgttgaccgttgcgcacgaaatgcatgtggccgcaggcgccttcggcaatccccctcaactcgccctcttcgaaacccccatcctccttttcgtcatcccgtaagccttcttcgaggaatttatggcggagtagcattccggcggtccatcgtctggtcgaatcgatgactaggcaccgtttcaataagtcgagcatgttatcgacactttcgatatgacgtttcgcctcggctggagtcgggttgctagacggtgggttgtacagagtcgggttgagggtcaggaccatttcgctcaaggtcttggtcgggttgagcgggaccgtgttcagattggtagcaaaggtgcggtctgaacggtcgaggccaacgtgagccttggggatgtatcaatgtaacggcgggactcactatgcaacatggcggccttttccaacccgcttcgaccaaagatggctcccagctcgagtagcgcctctgtatcgtcgttcgagttgaagacagggaagcggtggcatagtacgctgagcagaatgattccgacagcccatatatcgatcgctatggggatcatttccgcttcgctgagcaaaatgcgttatgaagagaccctttccagccagactcaccgacggtttgatcagggcatttgagcaagacctctggggcacggaatcctcgtgttccggctcgattggcccgtactcccggactgcaaacagtgaaatcgtgttgagcacggggcggccagcatggcatcgctgaggaagcgtagtacagaccgattgtcaacttgtggaatcccaactctgccgctggcttctcgtttccgaatgtcgtacacggcctgttccacccttgccgtcatgtttgtcttgatgcggtcaccatggggccgttcgagcgtggctggcgaatgttgacactggatcttgctaggtgattcgtaacgctgtctcgtttgtcggattagcttggatgctatctatgtggcgaccgagggccactcacctcggcaagaccgaaatcgacaaggacgccttctccgctctcataatcccacagaaagttggcaggtttgacatcccgatgaatgatccctcgcttgtgtgtgtcattcagggcacgaaagagacaccgaaagtacttcctgatatgaggtggatcgatatatttgtaaaacagctgacgaggaggcagaaacccgagttgaatgatcgacaagcccgctctccaatagctctgttttgttggacctacgcgaaagtcatcgctacgatgatatggcatgaccgcgacgatctgatcctctgagcgaaacgccgagatcaactgtgctgtattccgacaacctctacgtattcgacattacgcgatcagtcctcttcctcaaaggggataaacgattacggtcgactgacctcaactcttccataatctccagctcgttcactatccgatccggactactcgtcacatagatcctcttcagggccacataattccgccacggttcgcccttttccgtccaggccttgtcttccttgttcaaatcagttgctgcaggttcatccgtctcgccgtcgatcttgggtatgtacgtcttgagattccggctgtgcgcgacgtggatcgtattcctccaaaagccattctcgaacgtaaaagcgtcgatatcgatcgctttatagacagaggagaacgttcctgtcgtagagcagagggcagtgtgagtatctgttttggggaccgacgacaggatcgatgatctgggaatcaccttcgcccaatcggtcgacgattctgtaagactgtctcatcccatcgatcgcttcgttgatctttctgatatctgccttgacatccaacctctcatcgaaagtccggacttgcatgtgctcgtcgtagaggtcagaggagggcattccacgtataaaattgccaggcgcggacttgtcgttcgggtcgataggttctggtactggtgtcgacgggtccgatcagccactactggtccctatcagccgctagaaggggctttgggtactcacgagctctttccgtgacttcgactttacattcgtgatcaaaaggcgtagcatcgaaatccaccgaaagctcgctatcctcgtcatcttcgtcttgttcctcctcttcttcttcttcttcttcttcttcttcttcttcttcttcttcttcgaaatcgccttccccatcaacatcctgctcttccttatatgcgtcactcgctgcttcgaccttggcttcatccggctctccagtttcttctgcgggcctcgttccgtctggtcgtatcggcacatctgggagctccttcgccggaagggccggctgaccgtagtctgctattcgatggctgatatcgatcaatcgtttggcggacctcctggggggtggtaaggagcacggatcttgttcgccagctctatccggtaggtcatcctgaggaaacgagaccgaacggtaagtcacaccttgaactactcgagctgaacggcatagactatggcagaggctcaccgtgtccacatgctgctcgacatcgtccaaacctcttttgatacctcgggaacgcttcaaagggtgtggttgactgctatcgctaccatcatccccatcccctaggtacgtagagtcgctcctccctcccgtatgcgatcggctgcctgatggttcgagatgatcggtagaattgagaaacgggtttgacgagttgaaggtcggtttcagcgggagatgattagcggggaatggcgattcgtagaactccatcgaacgtggattgcaaagaattctatctcgagtgcttgtgatgagctgccgatgagcagtcgtcaaccatatgcctttacagtaccacgtcgaaaccaacttcaataaatgttcaatagcccatgacctactctggtactctgggtgccccttgattctctcgtaatcatctccgtttccacaaaaacaacaaactcgagggtcgctacagtcgctaccaccaagcagctagctatacatttccttattattatcatcaaggacgtctactcgtataccctagcccattcatattcttctgtcagctcaaactcgagagtcgaacgaatattatcaaggatcgaacggtcgtaccaaaatctacgatcatgggagaatgtaggtactgctgccgcggcgctcgcaagaacgctccgctaagattctctcgtgctcacaccttcctttcactccacctttgccctgtcttcggtcgactccagctcgaagcgagcttttggcttggatcaataccatcactcaggctgggtacaccaaggtggagcaatgcggtagcggggcggcttactgccaggtgagtagagacggaaggtatggattggaatcacgagtgattgatcgatcttttgtcccacgtctatagatcatcgatgcgatgtacggtacgtcccttggtatcaaatcttgagaggatgaggatgctaaattccagatactgacttcattctggatcctgcttctggctgttgacaggtgacgtaccgatgaccaaggtcaaagtcaacgccaaccaagaatatcaatacatcaccaacttcaaagtcttgcaaaaggccttcaaggatcacggtatcgagaaggtgcgttcgaatccatccagcaaatgtgaaagctcttttctgatgtcttttgtgtgccggtctatgtgtcatcgccagcccataccggtggacaggttgatcaagtgagccgccttggctgactattccatacctcttgctcccgctgctaagatactgactgccttcgcgtatgtccaggtgcaagatgcaggacaacctcgaatttcttcaatggctgaaaaagttttgggatgcgaattgggacgggactgaatacgatgctgccggtcgagcgtgagtcgagattcccatcttcgcagctcttcttacattacgccgggactgaccgttcaactctcttcgtcgctcagaggtgggcagatcgctaaccaaccgcctgtccgagctgccgctcctgctgttcgatctgcacctggccgaggttccacaccggtcggcgcccgggctggtgtaccagcgagcaggagtgggagtggtctgggcaagtcgtccctcatctccgttcagatcgcaactagaagagtgtagctaatcgacatggtgtcgcccctcatacagcacgtaatgccgcgccgacggtctctgcggcagcgagagaggagatcaacacccttcgtatgcagttggaagatctgaccgaacacagcttgacgctcgagaaggagcgagacttttactttggcaaggtcagtaacatcacagtgatccacattaagccagttctaaacaagaccaagctcaatcttggatgcagctgcgtaacgtcgagaccatgatccagacgcgactaagcgaaccggaagacaaggtggctggggaggagcgagctactttgacgagactgcaggaagagctctattcggtcgaggtcagtcgatcacgacatggtcgtcccggcggaaccaagttttctgacatttggtgtgtgtgacattttgtgtcgtaggacggattcgagactcccgccgcggatcttgaagatctggcgatcgaggatgacctgaacggcgagcaacttttggacgagggcatggctcagcctcaccagccggtagccaaggacgatgaagacgagacgttctagacgtactgacgatgtatacacgatggattcttgacgatatacactttcatatagcaatcgaaaggtttgcacggcaggacgggtttcgatggcagaacccaaccgtacatcattttcctgtcactgcacgcgacaagccatctatctgaccagaatatggtataggcaaggcaaacgtatgaccctggacacaatcctccctatctactcagacgaatttatatgagcgctgttgcacccttgcaaaaggcggtgaatcctccacgcttccctggatagtattctggaaacgcagcccaaacggacgatttaggacgaccgaaaatcggactcgacagcgtgataactcacctccttccacgactgttcagaggcaggagtcccctgccactcgtcaaaataattggacatggccttgatcggggtctgcccgctctcgtaccaattggctcgacgatcttgctggtactgtttggtttccgattgtgccttgccaaaggtgtgatcggacatgcggttgtcgtatgataggtccatctgactcatctcgacctgacccgaggtggatagatggtccggcttgttcagcctccgggtcgaacctgaacgagacatgtcgtgggggtgtatgccgttccgacctggtagaatgttgtccatagaaatcggatagataatggcggccaacttctgacgtctacgcggggtatattcggttacctgcttgattatttcagatcgatcggccagaacgctaaaaacttacgcaacgagactatgcaagattgtcaaataatatgtcggaccgatgacccaaaccaaactccgatcataactcccaaagatcccgttgatctcgaagaacagtagaatcccgatagacatgatcgctggcggcaacctgtcagtcagggtgtgtcagcgcagtcccccattgatgttgactcgagacgtacatggtctcagttgtcaagatgacgaccttcttcatgagcgtcttttccgaccccccgagtgtagattttgaacgtagcaatagagcgacggctgccagtcgtgtatgcatcgatgggtcacttgctccagaagatgaatccagaaccaactcacttgtcagacagatcaccacgtccaggatcggacaggtgatagcccaagcctttgcgaacatcccgatctacggtatcacctcccccgtatcagctcagccgtgttgtaatatcaagcgccggagcttaccttgtcaaaccagagaagaagtctcggaccatgagtgatactggtaaacactggtgggtgaaagccgtagaccgttgttctatgctcgcgtgtggagagaggactagatcagaccggaggacaagaggtaccgagtctgaacatgctctgaacgtacgtgattccgaaagcggtgcataggaggacaagagtgaccaagccgaccagaacgtagatccgcttccctgtcaactatacgtgccataaacagatgattcagcatctccatcgccactgagctgtcacgcatgcctcctgccgactcacgccccacattcgtcgactaaagtagactgccgcggtcgctcggaagaaacagaggaacagggtgatgaccatattgagtttcaagtccgtcatccagtaaccggtaaagtccgatgaattctctacgagtttgacagaggctgctgtgctcaggatgaattgggcactgtgagggtcgagacacgatccgacgggacgagcttgggttgtcatcaggaccgactatgattccattgagcggggctcactcacgtgcacatgatcgtgcctaatgagacgaggaccttataagccctggggtctgtagggaagagcctgaaataattggatgtctggacgagcacgcatccgaggatcacgccttccgcagccagaccgacgaccgctgctttctgtacgcgatacgtcggcgtaagctacggctgaaaactgtagatgaatcgaatcgaagagtactgacgatgatggtatggatgtcggtatgcatcgcacccagtaacaaggggtccagcatagccgtaggcataatggcagacgagtaagagtcgttctagatcggataaagcaaagaggtaacgaagaatcgacgaggaggttgagagtagtgaaaactgctgttgactgccgaatttcgaggtgggaggctgaattccaaccaggactttgtctctacggaatctaattggactctgccaagatgcgctgagtcctgacgggaagtcaatacatgtaaacgtgatatctgatctcgagcttatgacctagaactaggttcgaatccctgcgagggtgaaccataatcactcgatcacttggaaaggcgattagtggcatcacgtcgatgctcatcaaattcttcgacgcgtcgctgacggcgaatggcggatcgatccacccaaaaccaacactagtttccaaaccaaaacaggaggccgaaggcgcaggacaaggggctagatcacatcagctggtgcgtcaccgaggtgtctgttgttcacgagacggaggaccgaattgccatccgttctgttctatcgctcgtctataacgctgatcaaaccatttctccttgctcgcatgctcgggcatccataacgatcgaggcaaactgatcgagcacagcaggagcatcagcgcaaggacgggaattcgcgcgtggtgaaacttgatcggttacgcccccctgttcccgttgggcttcgccctcacgcgtctcctttgacccgcgtttcaatcgacagcttcgtcttctgaccgtgtccgtacaccacatgggtccatacgccggcagccgtcatcggcccgtgcattgaaaggaattctgcgtctgaaaatttggtggtaggggatcgcgagacggctcacgcagtgccagtcgggtcgctcacctggttctggtaggccacctccgccacactggagcacactgcaatccatatggcatgtcgatcgatcaggcagcaacgacgacgaacgcattacctcatgtgtcgcgcaggctacccggtcctgatgatgcagaaaaggccgagcgaacatggtctttcacacaagtctgcatggctttcccgcacatccagctcgaaccactcataacaacccgtgcaacaggtgcatcgagatgggcagacagcagtaccctctcttattggttaaaacatcgctcgcaatcacccgacacgggtcttctagccgaaccaattgtgatgccatacgagatactatcagcctgcaggcgccgatagcatcagatcgagcacgaccttctctatactttttataatctgcagtgatgagatctggtcagacttcgaaaagtgttccttcttgcatgtgcaccccacactatacgactcacgctaccaatgtcgtgattctaaactctgtacccccatccggatcgttcgtatcaacattgatctcgcaggtcaagacgtgctcccccggcgtcaaatcccccttaatctcggtcgtctgggggatactgatatcatagtcccagtgtccatccaggaagatcggcctgtggtgctcgtcatcaacccaacagcgagcgacgcccaacccatactttttcgatctttggtaagagagggagatggtgccgacgaccgtgtggaacttgaacttgaccctatctcccggttttcgaccgacaatatatttctggtccaagttcaagggactggatcagccacttgcgattctggaggcctcgaacacatgagatcggcccactgaccttgtctttccaggaccattcgacccaaccttcgctcgtctcctgcttgagagggttcttctttgaagacgtcgagagacactgaggcttgagtttcgccatcggaggagcgtccgcatcgtactggatcatcaatggccactatggttgacccggtgtggctcagctgacatacacacgatggagacagtcacgagacagatcggactgaccttgggtatctcggccagctcatcataggtcggaaacatggggtcggatcgatggagatcgattccgatatccttcaaccgtttcctctcgtccatcttgcacagtacccgtgacatgtatgttgccgtcaagttggccatagtccggtggccattgaacgcaatctgcgcagcgagacgtcgcgggccaatttctcagcacagaccggggcgtatgtcaggtgtcgcaacatatctgatacctacatgtcgggtgtccacgactttggtaccgtcaacgtccaccttggtgaaccagtgggacgcgacggtagcgttcttgaagatcccgggcaacaagaggttccgtatggtaatcaccggcgtgtcatagtagtgagccaccgcttgatgctagttacggtcgcggggagcagagcgatcagagcttgatatttcgtgctccgtccggatcagtgcatacctgggtctcgcccaacccgatggtagcgaaagttaacgaaaacacgctacaggtgggtaccgtgatgctgttcagaatcgctcaacattatggcaaacacgctgacgacgctcactttagattgatgatcgccggtcggttggggagttccagcagtccacgtaagagtctctcgtaggacgtgaccgactcgatgtttctgaagagcgacgagatagcacactttagtcgctcatcctgacctctcgcggtctgctggcgagttggctcacacctgatcgttgaccgctttggtcgcgaaatgacgagcagggtccgtgtcagggagtcgcatcgaccgaggaggatcaagcagagcgtctcaccaaattccacgagaactaggtctgaatcttctgggatctgttcggtgtaacaataggcgaacagctcggtcgctggtcaaatccgagccgttccgctctgtcagctgacggtcgcttcctaccggtgtccccctccgcacccgactcactcgcaccaggaatggcaccgttgacgaatcgatgaccctcatgtggatacctctccttgatccattcgtacactctgtaatgcatattgcccgagctgtccatctctgtcgggaaaccctcatgaccgagtccgtgacccgcgctgttcgagcctccaacgacagagacggtgatcggttgtccgctctgaagtttgtgaaagagtctctcgaggcggtagttcgagcctaagaccgagtcgagcgagaatgtgaatgagcggattgtctgacaaacgtcaaaacgaaatcgatccccaccttcatagcctactgattgagcgatattgtggtcgctttgatggcgatagggtgtagcgatgctcgtcagcccggatgtgcattagcatggtcccctgcaatctgaaagactcacccgatggacagacagaacacatcatccggctgacacaagtcgcatgccatccgattattgaacctgtcaaagacctgcccggtctcgccagtgctggccgtctgttgtgtattcgcttgacagacgacatcttgctgtagcctagtcgcttcgtccactatcgttcccggcaaccgatgagacgtctcatacaggccataggtaaagatggacactagtaaggcgatcaccaggctcttctgtcggttggtcaacatgtttcgccgagtctgggtgtacacgggctggggctgggctatctctcgggccctgtcaacaacgacgtagatcggtcgtgaatcgaaacatgcacagggcgcgcaatcagtcttgaaaagacacggttgtttggctctgatttacgacatgtcacattagggagcggtgatgcaatgtggcagcccagcgagtatcgaatgtgtcgacctctggctggccctgatgactgtgtaggcagctctaaatggtcttttgagccagaccaccaaacagtgtcatggcctgtcacgccctcttggtcgctcgcgcggcggccaagacgggtcaaagcaggcagcaggcaggcaagcagcaagcagcaagcagacaggcacgcggggtcatttcatttaaaagcaagctagcaagccgttcagccacggcaaggcgttgcaacgatcgggagagggtcaagtagttttcatcttctcgtctcgagggcatagagtagcttcgagatggcccaaaaagcgataaagctactagaagtggtggattacaacggtgggaggaggaatggcctcgattatgtacggcgtcggttcgacgagccaaagagtctacgtggtggaagagggggactagggattgtcgcatctaaatttgtcgtagtgacggtggtggtgcctatcgtccggccaagccagggcgggtgggtggtgttgatacagcggtaattcaagcaggagaaccgatcctagacgagcgttcgcgacagcatcgtctatcgtcgtcgttggttcttggtaggctgctgagtccgcttgtgccagaccttgtgttgacccttggcggtgggttcagtttcttccgtgaatcgcttctcgaccacgatcgaggcggcgggtgggctggcggtccgcttggcctcggctttgacattggcattggcggcggatcgtttagcggcgatggcagccgaggacgaagccgcggcgacggaagccgatcgggtgatggggacacaagcgttgttctccagcttgtatcccttgaggcacgagttgatctggcagattcccgagatgcaggcgacaccgctcatgccgacgatggcggtacagtcgaccccggcagatcggccttgcaggggttgttgacatccgccacaagattcgaggtcggactgggtgttgacgcattcccagcctgcagacttgccgccgaaacccttgacgccggtctcgcagatctcataacctttggcacacctctttcgctcgatgtcacgcttctgagggagacccgaagcgcaagtgctggtgctggcgatacagttggtaccgcaggctttggtaccggtgttggcgcaggtaaaggtacaggcatcacacgagttggggacagcaccggttccatagacacaagtcggggtcctggcatttaactggaaccggttacgagggggttcgttaaaccaaagggatgtacatcgacgagacaggatgtgtacttacggctccctgaatacccgacttgatgttggcaagggcctgggcacgagtgaaaccgttggtggtctggtaggactggtagttggtctggttgatctgggtggatcctgtagcaaaggccgcgttgaggtcgttgacggtagcaggcgtcaaagtgccctggtaattgcagtagcaggttcggggtcgaatgttctatcgagcgggaacaagacggtcagcgacggaacagccccgaagcacaaggagagacgcagaggactcacgccggtggtgataccattctggacaaggttgaccgtaagggggaaacagagggtggtttgagcgctctgacgggccatgagaccgtgggtggccgcggtgtaggtggtaccatcgtccaggtggagagtgacagcctcgccacgggtgacggggatcgaggtagccgagaccagagaaaaggcgagaacgaggaggcagaagagttggatgcggagagcggcgaacatagtgagagttgttcggagattggaggtgaggtagggtggcgggaagagacgggagatcgaggtgatgagaagggagaaggcgaggagggcctggaggatagagtcgaggtgacgatggagctgagagattgcgggcgagcgggtgaggtgaagaacaaatcatgacgggaaaagacctagatatctagccggcagacgtcctgctatatactcgtcactgagtatcacactatccgacaaccgacgtgcgtaatcagaactcggatacgagctatgcgagagtgaggaaaaattcgagaccccgacgactcgggttgcgagatcacaggtcaggtaaagtgaatcaacccctgacgtgcgcaccgctcgctagctgtgcgccagggccaagctagtcggagaatacgcgatgtcaatcgagctggaacgagcgcaaagatctgagaccaagatgaccaagaccttgaaccccttgagatgaagcgagacatgctgctaggggagtcagatctctccgggcttcgctcacaccgcccttcgacgccgcccggccgaagggtcggagaaaaggcaatggaacgcgcagggcaccggcgacagagatcaggcgaaacctatcatgttcctgactcaccgcgcgcgcgtctcaaccggattgccgagacaagccaaacttcacgagcgctgggcaggaagaggtaaagctcttgccggtacgcgtggaaccttcttttcggaactcatctaccgggaaagtgcttcgtcagagccagcgatcggcacgaagagaaacgcgagtcacgagtcctgccggcagccggccaaacatatcgctgcgtcgatcgggacgattccatgagcaggatcgagtctactaaggacgggacctgtcgcgacctcggggattttgcatgtctgcttcgtacctgcccaaagcgtccgtcgctcttcggcacgttgatgtgacgattcatatgacgagacagtctctccccggccgtgagcccaagcctgatcgagaagataatctagggtgtcaacacttgcaatacacacacacacacacacatgcaaaacacatgaagttgggcttgggatggaagcacgtctcgtttcggttttgaccttcgggcgtcgaagagtcggacgccttacccgcaaagcgatgaatctgatcatctcaattattcgccgtatatcgtccagccttctctcatcgcttacgtatcgcaccatgtatcgttggatggtttacaaaaggaaacccatctgtcgttcttttgtcatcccggagcgtcaaagtcgggctagactcggctgccgctcgcttgcttgtactcgacgccgcacctcaccgcacctcactgcaccgcacgtatccgtgtcaataaccgcacgatcggctcgacgacgcggtcatgtggcaattcgggatctgtccgtgaaatgaggccttccatttcatactcatcatagatcagacaaccaatttcggacgtcctccaaaccatcctgctttccctcagtcttccccggcgcttgcacggccatcccgctcgcggcccattgcacgtcgacgccctcgatctcttcccacttgaacctgccattctgaccccagaccatcaactctgcctcatccatcccttcctcactcaagacggtcggtttcgacccggctctacccgatcggaagaaccgcccgagcccgaagaacgaagacgaggtggacgtgagcgggacggcgtcgataccctcgatccggccggacgtggtgcctctggcggatttgagtcggtccatctccctggtgaggatgagtttggcacgctcgatggcggtcgtcttggccttgtcgtccacagcagtagggctggttccggaaccggacgttcgggccaacaggtcggtcttgtgtgcgaggatcaataatcgcgggatcggcgccgaggacgaggaaagcgagctcgcggcgagtcggatcaggacggctggtaactctctgaggaacgaaaaagaccgagagaggctggttagtacgggggaatcccactttttctggaacgaacaaaagatccatggattaggtccgggacaggcacgtactcggccacgtgaggtccattcctgatcaaagtcgagacgtcgcacacaaagatggcggccgtcgcttcacccgcgaggtgctggactgattccttcaatcgaggatgcccgggcaaatcggaaatcttgaccgtcttgtcgttcaagcgcagggtggaggtgctcggtttgagcgaggtgtgggtctgagggggttcgttgtagacgagctgacgccgacaaggcagcaatgtgatgtcagcgtggtattaccatgtgcatgtgatcgaaacgctcgccgtgcgtaccttggtgaagatcgtagtcttgccgctgtctgagggtccgatgaggacgacattagggtcaccctttttccctcgactcgtcgtctttggcgcgtccatcggactaccgactgtttctcgtaatcgaagatccgctcattagcctggaagcaaacgagtgtcatctcatcttgagtttgaactgacagatgaggtagtagaggatggccagccctgcgaccactgcgttgatcgcaaagacgggatccttggtaaacgtgtcggtgatcatcttggtgatgggtaccacctcggcggtcggctgagctgccacggtagagggcaagctggacattttgatcctgttcgaatgattgggagtcacgacgagctgtacgggtgggttggccttgcttattggataggtattaatgtgtgtttgtgttcgggtcaagctcagggctgtcgaatgtgacgaggtcgcttgctcttctcttctctatcacgtgatttgatgttgaccggttactcgggatcagcctagcaacggcctgggaaaccattcacttcatctacagcatggctatagctaccacatcaccaatagccttcttgcactgttgacatatacccgagcttgacatatcgcatcaataatggacgccatcaaatcgttcccatacacgctccccttactgctaggcgccggatccctgctagattcgtacctgtttccggcacctctgacgcgagaacagatcgtcaagccgaaagacgagctggtcctcatcctcggcggtagtgaaggctgcggtaaagggttggccgaggaatacgttttgaaacgaaatgccaaggtgtatgtacaatccctgccgagagacaattagctcgatcaggcaaagagggctgacagccgttctattgtgtggccgatcacagcttcttggtcgcccgtaccgagtccaagctgaaacaggtccagaccgagctcgtagaccgactcgtttccgaacagaacgtcacgatcgccgatgctcgatcgagggtattgtacatgaccggcgatatcagttctgccgaggatctgatcaagatcagggaccaggtcgttcaacgtaggtcttcatcctagccttcggtcaaattccggtatagctcatccaccgagccgctctttttcagaatggggtaaactcgacaccctgcatatcatctccggagtgccttcaacccagacgatctaccaagccacgggactagacatggtacccgcaacttctccctcgacgtctaggacgcaccgtttcgtacctgcctcgtcagaaggggagatcgaggagaaatctctgccggagaaggacgttttgaaagagttggaggatgaaggattgaggttggcggcgatcaatatgaacggggtagtattatccgtcggctgttttgtaagtcatcgcttgaacccctgtacacctaacagtcgaacgaaacctttgattgatctcgcattgaacttggattcgaacctctttacacagttgcctttactatcctcaacgtccgcttcgcccctcattcaccacttgtcgagcgtcgccgcgctcgtgcccgcgcctacacggatgttgtactcggctacgaagacggcgggattagcggcgttcaagacctgtgcggtcgagtgcgagcgtaacgggggtacgggttcgggcgtgaggttcttgggtcagtctcgaatcctcgcgaggatccgatcaggatcgtcgtccatcgttcgaagaaaagtttggatagctgattgatgtgtgggcttcgtagctatctgcccgggaacgatcgatactggcttcagggagaaatctacgagcgcgatgaaggcgggagggaagaagaacctggcagctgatgaacagagcgggaaagtcggcaaggtattatcggtgcaagagagtaagtccgcttccggtcgccaaggacgtcgcaacagaagctgagagtcgatcctttgaccttgtgtaccagccgtcgattcgatcatctaccattcctccttgtcaccgaaaccgactccccttgtgcttggtcttccattctccatcccgataatcggaaacctgctcaagatccgacttccgttgatcaaaatcccgcccaagaacattgtcgtcctccccgaatggccttacaagttgggctggtgggtggacgcgacgtggttgagggggatcatcgagaggatgggaaggcgcaagtacggattggtctagtcgatcggtaatggttttgcgattgtaagatcattgcgatcaggggcgaaaggcactgaatggaaggatgtgatatgcccaccctgcaacttgcgacttgcaaactagacgatctagacgagacgatgcggggtgcttgcccgtggaaaccggcccggatgaacgccgagcgtgggttgtcgcatggttcacacacatttcgaacacgttagcgcgcgagtcaaacgtcgtccaggcccaaccagagcgcgtacttttcgcaactccctctctccagcgctgctcgctgctcgtctctcgtccggttactccaacgttgccccgcaattccggtgtaataatcttttttggcttgccgctcgctgacttggagaagagatcatcagctggccttttgacccgaaagagctctggctatctgtaggagggatgacttggtcttttcgggtaagactccgggtcggcatatataccacggtcaagtcgaatctagtgcaacatgagacggcttcataggggaaatacatttcgagatcataacgcttcgtccagaacgattcagaacaggatccctgccgagagatatggctgcaaatcacggtatggagaagaaccactcggtcatggacgagaaacgtcatgctgtggacccgtcgaccgagtccgtaagggagactgacaccgagtacgaggcgaacgtgaatattctccgggcaatgtcgacggaagaatacgatgctttcgaaaagaagctcttgtggaaatgcgatcgcaagattgtgccctggatgacggtgagctcgcgagccgacttggaattccacgcaaagaatagaaccgcgcgctgaatggcgctttgcctgctagctcttgttcaccatgtctttcctcgatcgagtcaacgtcggtaccgccaaactcgccggactggtcgaggatctcgggatgacgtcctcgcagttcaacctggtcagtaccggattcttcattacctatgtctgtgagtttgaggggtgacgcgagatggcgatcgcgcgtcaagcagggctgattcgtagagactttccacagtgttcgaagtgccttcgaatttgatcctgaaaaaggtgtgtaccgctagtcgaatagtcgcaaggtagcccgccctgacgaggccacttgcgaacccatgtgatccgctttgtctaatcaggttcggtaagtgcgatgaaaggcaggaccagtacgcttctccgggccacgcgctgatccggctctcgattaaccagacctagccggtggattccctttatcgtcatcgcatgggccatcgtacaagtgtgcagtaagcgcgccgtaaccccgtatcattcgttgatcagcctggcgctgacttcaccatcctccatcttcagtgggcctggtcaccaactttggtcaactcttggctttgagactcttgctcggactgtttgaatgcggattgttccccggaatctcgctctacctcacgggatggtaccgcgtgagttccggcttttgttagcaaggccggaccgtcgaagttgaccgcagaagacggcgtgtgcttggacagagaaaagaagtctccaagcgaatctcgatctttttcgccggtgccgtattggccgggtaagttccaagtcacagatccgctcgtcattttgcttgcttattgtccctgacctggtcagtgctttcgggggtatcctcggatgtgagtcattcgagtccagtcactgagcgactcgtagactaattgtcaatttcatcgatctcagacggcctttcccagatgaagggcgttggcggcaaagccggatggtcctggatcgtgagtaacacgatctaccttcctcggaatcggtaatcgaacatctaaaccgaccgacccaccgcagttcatgatcgagggtatgatcactttcatcgtcggcatcggctcgatctggatggtctacgactggcctaacgatgcgacctttctcactccgctcgagcgtgcctgtgtgctgcaccgactgcaggtcgacaacggggtgatgaacgagggtaccttttcgtggagcatcgtccgacgagcgtgcctggactggaagacgtgggcgttcatgctcctctacatttcgagcgcgtgttcgatctactcgtgcagcatcttcttccctacgatcatccgggcgttggggaaatggagtagcccgcagagcctgttgttgtccaccccgccattcgccttttcgttgtgtacgacgatggccacggcgtacttgtcggacaagtgggggaagagggcgtttttcctcatgttctggttcacgtgctcgatcatcgggtatatcctgctgttgaccgtcccgctgagcaacccggtgagtagggttcgtgcggtcgatcgtccgaatgacccggtactgactcagtcagcttttaattactagggcgtcctctactttgccgtgttcattgtcatcggcgggattgccccttgtatcgcgacgacgatcgtctttgccggaaacacgttcggcaatcactacaaaaaggccacatcaatgggtctcacgttttcgctcggtaagttgctcctgcctcccgaccctgcttgataagtgacatgtgtgctcatgagaaagtcttcttgcttgtgctgattgcgtattggtaggtaattcgggggggatcgtggcttccatgatttacaggacggaacacgcgccgaggttcatccccggtcacgccgtctcgctcggtttcaatgtggtcagtccatccatcttcattgttatccagcgtcttctgaccttccgctgacatcgccctgacgacaccttctattctaccttgcagatgggcgtcatctgcgcgacggtcctcttcttcggtcttcgtcgtcagaaccgaatccgtgacgacaagtacggggcgatcgtcgaatcgagtacgactcaacctcgatcttacgcttccggggaggatgaggagaggatgatcagccgggaggatatcgatagtgatgagtacaaggcgaggtgggggttggaagggatgtctaggagcgagattgtggatctaggggacgatcatccggcgcataggttcattctctaagtcggtgggctgaaaagacgtagccgcggaaaatatcaaggatagggtagagggtttgtgtttgtatcagagagggtattatataatgaggctggatgacgattggagagaggggtcgatctggacttctcaagcgttacgatagaaaaactaggttttacaagcgcgatcacctttgattgcgggacgtctgatggacgtgtggtgaccgggacggatcacgattcgacaccgtttcttctaccacggctctgcaacgagagccgaccttgagcggatctataggaatgacttgcgatggctgtatcgatatggatgaacgaatcaggttgagatatgggatggatggatggatgggtatgtataaccgtggtttcccccgagtctctggtcaaaatcttaaaagtgttcgtcatcgctcgctcgacctcaaagtggggagtgacgagacgaggtgagcggatcacattcgaatctcatccggaaacaccccagacctattgctcggaccacatcgagtgttacccacttcaagtcgttactacgaagatcgtcctccacctgaagtggcaatctcactgtacctggttgccacgtaacgagtgtaccgaaccctgaccgactgatcctggctggataatttgcgatcgacgcaaccactttacacgcggccgagcgacttgtgctagctcctgagcccagcccagcccagttcaggttgctaacccaactaatcaccccgtctttcactcgacaatcgacatcgcccccaaccccaataccagctcgtacttaactcctgtctcgtatctacccatactagaacgtctcacgagtcgaaaaggacctggtttcgaatcgaaacaaactagcacacgctcgccgactcttcttgccttgcaagggaaaggactttggtggacctcacccccttgcccttcatccgtcggccaggtttagtgcgagaaagacacgttgatcgtgctcgttcggtaacggcaaaaggcaagtcgatgtggcgatcttgatcttgatccttctttacctgcccctattgcttcatctcgctccaacaccacattgcctcaatcctggtctctctttctcgtcaatcacgatatactgacccgcaacacctttacggactcggtccctctccgcagctctttactaattatcatctccgacaaaaccacgagcaagatgaacacacaccacctcaacacctcgtcctccaatctcctccccggtagtaccgcctctctcggttctggatcgctcaccccttccccactggccacccagtacccacacctctcacactatatcgcttcgttgctccagatcgctctgcaagagaacctccaagctcaagcgaacgctaaggagaacggtaacgcccaggacgctccagcgtcaggagcatcatcagcagctacgacaggcggggtggtcaagtcgacgaaacatcctttaagcgtgtccagcgcgagttcagacgtccacgatgaagacaacaacggggatctcaatgaaaaggaagagatggacggagtggccaggtcgacgacatcttcctcttccccgccctccgtgggcgtctctgcttcggaggacgagggtgaaccgaaattacgactcgagatcccgatgactgtgcatcaacctctttcgtctcactctcaatccccggtcgtcggggtcgctcatgtgcccagtgcgcagagggaagagttgatcagaaaggtgatcgacctcttgggtaacgaaaaggaggaagaggtcaagggggtcgtcaaggagaggttgggcgtgctcgggaatgtgagtctggtctgatcgaccaaaagaggcgaggattatcgagaggcagaggtgctgattcgacgaggttgggatcattcaaggacgagtcttatgtggatcaggtatgcttggatctcatgcacaagcacaagggtcagtcgatggcaaggccaggtcccgtgcatgagacgctgacgcatgattcatcgactcgccctgatagacgacgtcgatagcgtcccttacacccccttcagcgtgacgccgatcagaccgaaagcttctcccatcccagctcatgcgcagcctttccgtccgttcaccccatcgagagtcccttcgtatcgagcgaggacacctctcggtcgaccccagtcccccgcagcgggattgggtgcagggatcatcggttcggggagtcccaaatcgacccgggctatcagcggacaatcgcaagccttgggtgcgagttccgtcttgggtgcagccggctacggttcggccgcgggattcaactcggccatcagtccgatggctagcccggcgagcagtccgcaattgagccatagggcgttgaactttgggcattcaaaccaatcttccggcacctttaccccgggaggatcgttaatggctggtagtggcggattgaacggattgaacatcaatacgatgagcgttcctggatcgggagccgtcacgcctaccggaactggacccaaattggggatgcatttgccggctccgtacaacgcgggcggacccgatccgtgggcttctgcgtttggcaagatcgcctctccactgggtactccgcccatcatgtctcgaaggtcatcgttcacgggactcggtcaggccgctttggacacgtcgggtgatcacggacagggagacggtgggtatcctttccccaccccgactttgcccagatcgatcgggcccacgtcatcctcgggcgaatccacgggacggcaacacttgcacgatacggacgatcagggggtagacgacatcttcagtacgagcgcgatgaaccggcacaagcacttgttgccggacgaagacgacgacgagttttcgccctttgggaacgatgacaggcaagatggtggacagaggggatccccagcgaccaaattgttggccactgccaaggcgtttgatccgaccaagttgggacctcccgtcagaatgggatcgcctgctgggttcagcccgggtaacgggcctcaacctcttggcggcagctactttggaggcggcggtggtggtggcgagcagcgtccgaccgagtacggcggcggatacggcggcggatacggcgggaacgacgaattcgcctcgatgacgagcggaatgatgactccgggaggctcgcccttcccacctggtcctggcccagacgatcccaattacctcggcgagggcatgaccccgttggacgtcttgcagtccgtattcacctccttgcccatcggagacctcgaagaggccctgcacaagactgggtataatttcgaagaagccatggccctgttgatctcgcagaacgggggtactaggtctcacaatgcaggcgcgttcactcccgggcgcgaggatggacccggacaccacatgcccaacaataggcccaacgtatttgcgcccggtggacctgcttcgaggaatcgagagatgccccaaggcggctactatcagtctggcggcaggggtggcttcgggatgggcggccctgggaacgcgagcccgcgattcggtatgggcggtggaagcggtacgaggactccaggtggactcaagatgtgtagatactatctcgctggagaatgcaggcgatctgattgccgtttcaggtgagccgtccttgtagggcttcttcgggtggttcgagagtcgctgaccgttcatcggtgcagccacgatgtcgatcgagccttgtgccgattctggttgcgcggacaatgcgcgaagggggatcagtgcgagtgagtttaggccattccgaaccagtgattgggttatcgctcagccatctcgattctgtagattcatccacgccttaccttccgttgacccgaacatgctcaccaatgccatgtcgcgcatcgaactgtcccacgacggcacttcccggccgagaacgagacccgatgagtttccggatctacacatgtcggccaaccagcgaggagccgcctttgatccctccaggaatcgattcgcaaacgccgtcaagcggcctgtacaaggtcctggacctcaatacacgcacatcggtggacagcgaggtggaccggtcattccgccgagtcatcggcccttttcatcaggctctggattccgtcgtcgtgtcgacggacctctttcgacgggtccgcctatgcctcatccttcccctcgaatcaagctgcggcctcctaccttgatgcccacgttgccaaccggtgcagcggtgaacgacatgtacatggaggcgcgacaggccgcgatcaagctcggacagtcgcgcaacgcttgtctagcgagggccgccgaagcctggcgacgcggtgatggcgctaccgccaaacgtttttcgcgagaagccaacgtactcaacgaaaggatgaccgtggagactgccgacgctgctgccaatcttgtccgacagaggcgcattcaagcgcaagacgccatccgggcccgaggtgaatggagtaacgatgccgaagaccggtctgccaagggtaaagaatgtgccagtggactcggtgtggtcatgggagtcgccggaattaatctgctcggaccgggagccgagtcgctctcgacatcagagcggaccgaggtcttgctcgatctgcatatgctgcacgccaacgaggcgtctgatgtgctcgaagactttttgatggctgtgggtattcggtaatgcagtagtaacccaacgtgacgaaagcttatgcatctttacaaacagttggagagggaaaactttcacggactcgcctacattgtggtgggcgacgaacgtcatgtcggtactcaggacaccggtcggggtgcctcgcgacatcgattggcctccggtatcaaaatgttcctgcaacgctacggctacccctggagcgaaggcggcggctgcatctgcattgacgctctgacccactcttgagcggtaacgaaacgcatacatacacggattggaagaatgaactggaacagaaacaagaaaggacacaccgcaaaggaaaggaaaacaaaacaaaacgatacattcaatgcaataaaaggagataaccctgccagctcacgaacaaaggcggaaacgaaagaccgcacccgacaacgggaaaggaaattacggcctctgagccgaggaaacgcacacgaacgacggccctcgcatagactctgaggagacgcctgtcgattctgtcgccgcacaaatcctaccacagtgtatcttgtatctttgcaaacatgtaacagggctcactgggtgatatttcgtacaaacgaagcgtctagagtcgaggtccggaaatgtcgctattctcatttacatctattcccgaaaccagaccatcactgttacttttttggcatggacaacctctgtgtgcaccgggtgcatttgccaggtgacaacgaacgaaggctggacgactagaagggaatcaagcggctgagtcacagctcgtctgcttgaattaaaatgactcgtctcagacgccgagcgacaacgctgaagttatacagaccgtaatcgatagctactgtccggtcaaccgctcctgcggtcaggtggagacgcaggtggcctcactgaaactccacctcgtcactagcttcaacgatgatagaccgtgagcgacagtccatgccgaaattgaggtgctcgatgtgaagctcgcccagctgacgcttctttgtcctcttttccgtttgggcgcgccctttcccttcatcacacacaagatgtcgagttcgaacgactcgcgttaataaggtcgagacgttcggtacccaggtggacaaacatggcggcaggcggtatgacgcccggtgctatacgaaacctttcgaatagttggtccgtccccaacaagtgcttgaagaaataaggagcagggcgttggacttgcgagcttgctgcttgctactcgggcgatatctctcgagtcctggaaactagtcatagagttatcatttcattatcgtagtccatgctaaacatggtgaaagtacacgtaaggctcctcttcctagccaccgaatataggttgggctgctacagggtaggacgttgtaatgcatgttcctcgagacgggtgaaggggaagcactagcggtcgttattgatggaagatgggagacattcccaccggagaggaacggcagggattttgcggcaggataagggcggtgaagcgtatgctcaagaggtcttccacaggaggatggagatggggcctaggtagaagtagatgaagttttgggtctctgtagcagtcgtgcaagcaagagaagtgtcagtgcgtattccaagcatgagagtgtacgacagagtcagattgaggcctaccgtgggtgacgaaagatccaaagctaagcaaagggatctgatcagcattttgaccgaccgttgcgacctcggtcctgatggcgacttactttttgccgacgacgcagtgccacgtcacaccatactgagcgtcaaactccctctttaggaactcagccatgtccttttccatgctgaatttgttcaacccctcactggccagctcgattgctcgatccttcatgtcgtcccgcatgtcgacattcttgatcacggccttgtgaggtgtagacgaacctccagtggcggcgagaggcgtcttggacgtcttgttgtcggcgggattgttgaattcgtccattgtcgagtccgcggtgtagaatatggatcgctagaagcgagaaggttgatcgagagatgtcaccaaatgtaagatgtaattcggtgacgttcttggaatatgagattgaccggattgtcaccaagctagctcgggacttgttgtgatcgagctagctaacttgagatttcggttccgcgaactttgggccatgacgaacctactagctatgggcatgggtaatagggatagatcacaaagctatcaagtttacaaccaacgcaaccaggtggcctactaagcactagtcactagctgtcgaaactagcgatataaaaataacgtgggatcgtgttcataatgtccaacggatcaacggaccgcgaaatcaaggtgttgatggtgtgtcttgggtgagtacggaaaacctgagcgctcagaaacaacgaatattgtcgcaccaccacatcgatctgactttgctctccttgcggtatcgttccattgggatgctgttctatcagaaagtgagcacgaagccccggattatgtttctgatgagccgttccgctgacctcacttgttcacgtcgcagcatctggtaaatccagactatcaaatagatcaaggccctacgtcgatccgacccggctcatacctcgatcatgctcgtgtactagccgatcacctatggcggaagccgtcttccaagatcaagtcaaacagcggagtaatgatgttcagggcaagatcgtcaagatcgattcttgcgggactggagcgtaccacgtcggggacgaccctgacgagcggaccgtgcagacttgcaagaaggtgagaccgaccgcgtacacactcaatccgatatgctatgtgttgataatcagacttccgtatggtactgcagcacaaggtacctataaattcggtcgccagagccttgagcaaggaggactttcacgagtttacccatatcctcgcaatggaccagatgaagtgagcaccgagtaggctacacatcggctgactgtctctttgtattgctgaccgcgatcactcgtttcatcgccgttcgcagcttgcgtaacatcaacaacgtccgcccggccaactctcaagccatcgtctccctcttctccgcctttagccccgaggcttcctctaaacccgtggatattgtcgacccttactacggagccgggatgagcgggttcgagcggtgttacgggcagtgcgtgtcatattcgaacgggttcttggatcagctggaaaagggcgaactggagatccccgtggataagaggaaagcgaagaaggctggattgtgagcgggtgagactgtgtgagcggtacctcgattggatcatggatacgctatatctgcatgaccacgaatggaccggttctccaggagcttcttagagaagcccggtcccgaccagaaaccgcatttgcattttcagcggatactgccttccgtccatgctgctattccagctgcccatgcttgcgccaggataagtggagcgcaagcggcatgctcgactatcagtccgccttcggtgaacggaatccgagacggtcggcgtattctgtctgcaataccctgatgcatagcgctgcatgtagctggcgagatctcgcgcgctagattcgagaacatccgagatcggaagcgagttgaaatcggaaagtcatttgcagggagatctcgaacatcataccatctcactaaagtcgttcagagtacccagagtagtgtcttcagtatcgaaagcggtcactgcataccaagtctagacagcttgaattcatctccataccatcgtgcacgaccgtgtcgccagtaaccatacttacgtgaagcagcactcctcaagacgaacgactgacgagcatgagaccaacgatcgtccgattgactcaatcatcgactcgaggtcgatcacgactgagagctgcggatcagttgactttggagcacgtgagtatacggaatcggaatgacgagcatcaatccgtcattcacgcggtgatcatcgacttgttcggggatagtttctgctccgaaccgaaatcctgaaggcataccgaaattccgtgaggtcaactcgaggtgagttgacaggcgtcgtcaagagcattctcaacaagttcatcacagggactgatggacgaccatactcgcccgactcgtatgttagtactaccggactctacaacacggcgggagacgttggattggttgagaatcgacttggaaaagttgcagaagattagcgatctagtcagtcatcagtcagctgcacatcgatgaggaacgctcgcttatcggtcgtcataacattttctctttccctttccatttgatcggtcgcacgtcgtcgtctcacaacggtgcacctggttgatccgtccgccgatctcagccgacaatacgagagacgctcgcgacattcaagcggaacaacaagcagttcatccccggtcttgggctttcgacggccggtatggatggagccacccagggttccaagcttgtcggacaaagagtctctagggagtctacgttgacgagaagatttttcgagtagattcgaggtggttctgtgagattggtcgtgatttgttgtagctcccgatttgaaggacgagagacaagtgatccgaagctccgaagtgattcgtcatatgcgcatgtgatggtcgtcgcggaaactatctgagcgcatattcagattatagaggaccgtgcactcttgaatgcttacaacaacaaccttttttgttctctcggatcaccttttcgcctcatcttgacgatcctcgggttggacagtatccccggacttcctttatccctgtccaaaattgcatcaagggaacgaacgcgatcacctatcgactatcaccctcgcgggaaccagaatgttcaggctgttcacagagacttcttcaagctcgatccgcttctcaggcgaacgaagttaccactgaaaagtcatcacattcggtgaagaggacgcacacacacacttggatgcaagagagttcgctcgagatgagcacgatggggtcggacgacgcggtgaggtacagccagagacaaccgttgacgtgagttaccaggtcaagtccggcgatgtcgggatcctgagctgaactgtgtttgaccattctgatcgttcgagtagctgttatgagtgctctaggtgagtcgagagggcgtaatggaggtctcggacagtgcttgactgatatagatcgacttgtcgctggttcaggcgcaaacagaggtgagtagtagtagaatatcgcgttctccttcaacggtgagcttagcgaattcccgctttggaaacagatgcgacaagaatataccttgtcagaattggtaagctgacttggagaaaataagaggactaagcacgtcgctgatgctcattaaatgcgtgattgcaaagcgtgaagagggggaagggagagagctgtcacgtcgaagagaccgtcaagcggtgagaactattctcgttctgagcgattacatttctgttagaagattcagctgaaccttctcttgccaggccgcctgcccagaggaaacgtacgcgaacatacgcatcgacgaacacggtggacgggcttaaccgccgagtcgcacacctggaagaccaactcgcctcggtcgtctctcagctcaatcatggggaagtccagggagtcaagctgatgtcgccgaaagaatacaaatcttccagtattctcggcagtgtgaggaaggactcgtcggacggggtgtttgaagagggcagcgaggtcgatgatagcgacgacgacacactggatcaggaagcggacgctgcggccaccttggaattgtgaatcaggtagcttttgaatcaataggtggccttattgacatcgtcttcttatgttatagtctggctctcggaagatctcgagcaaagtctcctggaggagacgaagacgactttactgccaatacttctcgacatcagaaacctcccgtcttaccgttcagcttcagtgcgcaaggtctcggattcggaacaaaaggcaacggtctggccttgaactttaatgctcaatctcgaggcaagtacgactacaaaacattgatgaggcagagtgtggtggaaatgctacctccagaaggtctggcacggcaactcgtcactttcgacgtagaatgtgtttcctggttccattggtacgccggaacgtctggtgtatcaaatccttcaggtaggctgatcacgttgtctggctccgacatcccgaaaccagttgctatcatggcccatctgtccgtaagtctggagtcgagcaagcaaggcgatctttccttcccgctattctaacgctacgacttctgtagtcaacgactgcgaagctttttggaaggatggtatgtccggcgaggtcgagctcaattggagctggctcgcgttctacttcggcattctgatggtgagcacgtcagtgtcctctgaagattggatcaatgctcatttggctttgcttctagtcggcattgcaacacatgcccaccgaaaatctccaacaggtctttggcactcgtaagtccacttcaggactcgcatgtggcccgaggatactgatagatgtctcgcgtagcctctgtccaaaatctgctcgaaagctactttgaggcttgtatgacctgcttgcaactagccgactggatgtccaaccatagcttgtcagtccgcgctacaaatggcaggatatccttgtctaaccgtaccgtggtgccagattcgcggttcaatgtatcaccatcattgtctcgacggctaatcatttgggaaaatctgatttgtactttaccatgttgggaggcgcaatcaggtgagtgtgatgcagcaagctatcgcgagcgatcttatctcaacgatacggtgctgtttagagtcgcgcaagcgctcaatctcaaccatcttggtccagatccatatctgcaagcgggtgacaatggggcgcaacgtatgacgccgaaagcaatcatcaaccgagaggtcaagaaacgtacctggtggcagctcgtgatccaaggtaagcaccacgttcacaggctcgatcgcaacttgtgctcagataccctggtatcctacagactggtttcacgcggccttcaaccgatgcaacggtgagttcgaagataaggaccggcaatcccgaatggtaaagtggctgatcgtctgttatcggtgcccagcgatttctcaaaaccaattcgatacacctccgccgttacattgtttcgattcggacttgcaatcctttaccaacgaaatgaaatccttgtcgatcgaggttccgacaatcgactcgcatataaaacaactattacgaagtgggtatctcatggctatctcgatatagagtccgttgctgatgcaaagttaccccctcagttgcgattaccctacacaagtgagcagctacactgacgtcagttcgagcgcagatcgatccactgacgcgatctacgagcagactttatcgtgattacccctaccgcggaagtgtcccttactcacggataatggaaatcgacgccgctatgcaagaggctatggaccaggcaccgggatggatgaaattcaacccgacggatggcatgcccaatccctttcctgacggtatcacgccttctccgtggatacattggcagcgaatgaattacttggtaggtcaaacaagaatcgatgtgtgcttcagccggacgctaaggtggcacggctcatagtgctcagcagcgcacaaggtcattgttctacaccggccttatctgggcagggctttccgtggcgatagtcgatacacctactcgcgacaggtgagcagtttccgaaggactttgcgagcagacagtcaactcatgggtacttgcaatagacatgtgtggcgaatgcgcgcagaatcttgacttggtttactacgtttgctttcgaacccttccgcaagacatggtgagcggcgcctacgtttctggatggaagcatggactgagctgtctaatttggtgcaggacgactttggcccacgcggttgctgcatcaatcgtgcttctactggagatcatgcacggcgccgacgccatcgatgcgtcctctcaagagcttctacacctggtcctccaagcaatcgaagtcttccgcacggtaaaacagcattcacacatcgccgacaagggcttggagatgcttacggcactcgtagagggttatcgacgacgcaacgagccgagattacaagaccctcgcatagccagaactacatcgttcagtgatcgttcccgtgcagagatggacaacgccctgcaggtcctgggtagcagtcgagaggaagctttacggcgtcgaggttcagcatctgagcgatctttgaaatcgccacaaaaggaactcgtcactccgccagcattcatacagccggtcgaccagttcaaggtcaccccgattacagcgcaagttggtcagcaagaggactcgagcggatttgcccttgcactggccaacgtccagtcacctttccagtggttagccgccgcgccactgcccatcacccaaagcatggacatgactgcggagagctttgccattccggagttcggcggaatggatggtttctacgattgggatatcggtctcagctggatggatgatgagattgcacagccgcaatgatcatgatatcggtccagggacggacgatagcccgcgttgaaaactctggaacgaaacttcacgaacagggctgtgctcagatggaaagtaatgtcatatgatgatgtacgttatagcgggtcgggagggcgacattggcgttgctgctgttgttgttactgcgggattgtggggtatactacgagggttgtacaatagaggattatcctggtcgtttggtcgtgagatggtgaatatgcaattatgttcggaccttcaagctttcgtggcgagcgccaacgtagctggattggcagagtatcctggagagaacgcagatgtcggggcgaaactccatacccggacttcgccgtcgtctgatccagagacgatcatgtcatccgagagctgaagactagtgacggctgcggagcggcgacgtggttgtgtgtgtatgttagtatattggaactgttaggacggcaatcacgagaaggagcaacttacctccacggtgtccaaccagtgtccgcgcgcatctaccagattctcgatcccagatctttatcgtgcgatctgttccggattgcgaacgaccagattagactaaggtacgacggcaggaagcggaagggcgttcgacttgccatgtgaagccgaggccaatctcagcgagtcaatgtcgacggcccagactccctcgatgtggccaaacagggtacttttctcggtcgcagactctacgtcccagaccttgaccgtattgtccagagctcccgagaccaagatggcccgcttgtcatcgggtagcgacgtcatcagggccggccgctcgggaaccgtagatgtcaagccgctagcgtgttcctgcgattgggagtgactgtcccggtggaaaggcgcgaagggagccgagcaggagacggggccggacgcagctttgtcgagcatccgctgatcaccgtcatcgatgtgagaaacggatcttccacgaacgccggatcgagtctcgtcgtcggaaccatctggctcgacctccttgtcgacgaccaacaggcggatactgcgaacctgtcctgtatgcccggaatacgtacgaaggcacgttttcgacgccaagtcccacatcttgatggtcccgtcgtcgctcgcggaaaagatgaacttggctgacgattccgatgcgagcggtgacgaggcagggccgttgtgatcgacgatgctattaaacgcgcgatctgccggagatgtcgagccatcccagagcaacaccgagttgaccatgtcggtatggccacgcagaacaaagcaactccccgtcttcatgttccagatctgaccgatatgcactcggcctttatcagcctcggaacgccaaacgagccgtcttgtcccgtccgacttaccttgatggtccgatccgcactcccgctcgccaacgtgtttcgatcgtaatgcaagcaactgaccccctgggtatgcccctcgagcaccctgagacactctcccgtcctccaattccagatcctcaacgtcttgtccgaactcgccgtgacgagcatggcttgatcgaattgcaacgcgcggacggagcgggtgtgtccgagcaaggttctcacgacctcaccagtgtccaagttccagaccttgatcgtcttgtcgtacgaccccgtgatcaagaccgggtacgacggggtggagaggttatgctggacttgcaagcacatgaccccattggtgtgacccttgaggatccgttcgacaggacgacctttacgccaatttcgttcgaccacgagccgttcgcagtagacgtgtttccacggtttccgtcgagccggacgcggggatgggaagttcaatgtggatcctgagcgggtggtcatcccggataatgttccggtcgtcgtcgtcgtcgtcgtcgtcgtcgctgctgactggacgttctgagcgaccggtcgactgggtccagcatcgctggtctcgctatccgaactcgtctccatccgtttgatcgacccggaacattcttccacatcgacccgtcttcgtttcgccaggtgtggggccgatgccgaggaagaagcatcaaccgatccttccccctctccctcttgtattgccgaccctcgtctcttttctccccgagcctcgcctgtcggaaccatccccgactctactgcacttgcacttatcgagcccgaacccggtccgagcgggttagcgatcggtctgagctccaacatcgagtgttcatgtccgtgcccatgcccatgtccatgtccatgcccgggatgtccttcatgcgatgcatcctgatccttgccctgttcctccatcctcaacctcctcctctccaagagcggcaacccccaaccacacctcgtacactttctctcgatatgttgcccgcacattcgtctccagagtagatcgtcatccgcgagctctctccatcccctgctgacctgtgcggctttccctagtgagatggcgtcgaggaagcccaagaccttgagtgagacttctttgggaaagaggctaaaggggtcgacccggatgatctgggagagtgattccgagaggtgagagagttgggagaaacaacacatggtgaggatgccttcgaggatgatcttgcgtttagggtggggtgacgaagagaatgtggaccagagggaagttatggccgctcgttcagccagtggcaaggcgtccagggactacgtcgatgtgggaacgagaagaagaaaaggtgtcgtgtttagctcggctcggctcggggaacgaaatgggcgaaggcgaagggcgctcaattaaggactttggcgaggtacgtacgtgctgtaacatcccattgaccccttgatccgccatactttgatgcctgacgcacaacgtccgactactctcccctcttgtaccctgttgaccctccaggttctcgacaacagcgacgctcggaccggacgtgctggtggatcctgtagaaccgattgatgcgctaccgaggatgtcgagatccaaatccgtagttggggttgataaaggggtcgaaccttgtcctaacgaatgcataggtaaagccgaccggggcggagaggacgacagagcgacggcgtgtttgacttgaaggtgctcgccatccgatccttgattctcaacctcgactggttgtggacgatgatgactatgatgatgatgatggtagtgcccgtggccgtggccgtggtcgtgcagatgacgtgggtgtggatgagaaacgggatgatattggtggtggttatggtgcccggcacctcccgcactcatgacctttttcacctcggccggggtcatcaacttccacgaaggtcgaacaggggtgttgctattagtaccatcccggttcgaggaagccatgtgtgttttgaggtacgacgacgacgatgatggtgcgagtgtcaaggggaggacaggatgatgtgacaaggtcgctcggagaggtccgagtggcgcgagaaggaggaaggaggtaggatgtcgtgctcgattcgaccaagctctctagtcttgtgagatatcgcgtgacggtcccgtgatcgtgtttagccaaggtcgaggtcctaaatcgttgcagtctttgatgatcgtgtgtagtcgttgtagataattaccaaggagatgccacactcgacatgtgctggtacactactactacttcactcgttatctaaagttagtagctagtagctagtttgatcgctgccccctttgccttgttctctcactttcccattttacgcgtcgccacccagatagtcgcttcgtttcattcctaatcacactgctagctgctagactggttttcagaaaccggcaatcaaacgttcacagtgacgaccagggaacctctcattcgcaatcgtacacacactcgaccctctttgatactcaccctgtagctccccgtcccttgctaggtatcgccatcgatacgctcctaatcgctctcatgatcctcatcatagagggcaagacccggcttcatcccatcacgcgcgcgcggcatcgaatgaacccggaaaagctcccggttgaccaaaaaagagatctcgccatcgatgtcgccatcacctcatccgcagctcagatatcatcatcgagcttcgtcgtcgcccatccccgaaaagcggtttcggaatcatatcgatagggtaggggaaggtgaggtatccaggattaatcgctcgaagttcaatcgatggcgatggcgttatccatcgacagcgtgatcgagtcaattccagaaagaaaaacaagagggacgaaagaaacgaggaccaggatcgaaccagatcaagcggggatgggatggagactccgggctcgtgaccgtcaaacgaacatcttgctcgtcgtctcgctctttacaaacggctcccattcgaatgaggcatgatcatggttgcttgcgttacttttccgtgacctacaaaaaggtgtttacaacgagtggggtacagatccgaatacgaaagatgagaattgctaatgtgactgtcgatactagtgaacaccgagatcgacctgcatagatctcatcagacgatactacccatgtccacagcgctcctcgctctagatactcgttccttctgaacaaggttgctcgatttcagctgagacgctcgcccgggtactggcgtagacgtcatgtcgtgtgcagcgggctgtacggatttaagacccgttcccaggtccttggcgactgtgtcgggaagcatcttatcgtttcccttgccgctcttgcctttagagcccgggcgggaggcgccctccatcatgaccttgcctcgacccgtgtaatcaagctccgagtcagggagatcttcctccatctccgagcgggtcaggttgaacaccttggacgcgggcttggctcgagacagggcgcctctctgtgctcgggaaaacggtggagccccgacgtgagctgctagttctcggtcgacatggtctgtcggtccgctcggcttggacgaagcgtcccgaggggggtcgtcgataactatacgaggtggtatctcggcttgctgtccgttcctattacccttgtctcgcgctgctcgagagggttgcaccgaggtgtgagaggaccgggatcgaggctcgtcgatctgaaccccttcgtccgcattgtcccgcgcttgtttcgcctgggagttcagtctgaatggatcatcgatagtcagtcttgcgctcttttcttctggcaagaaggcagggagcagtgagcgtacttgtagtctgggtgtaatgtcaacccgtctcgagttcctcccgtccaatttttgaacgccttgatcatctaacaaccgagttacaagtcgcgcttagctggatgatgcttcaagtgacagaccgcagactcactttcatgtctacaccaaactctcgccgctccatcgtgcctcctggcgtaaaccaggcgcgcaacttgttcgattgcgtaatgttattcacgaaattccagcccaaggctaaggttcgaatgacatcagagttggaaagaggtacgagatcgattgtgccggctcacgcttcttagaagcattagaggatttcccacctcctcgccgcgctatgggctccgggccgatcgggacgaggaacccatactctctcatcctttctactagcaatttgacgtcctggtctcatatgtataaccttgtgtcagcgactttgagtggtacgacaatcagaggactcacctgaggaccacaacctgaaacaattgggttgggatagaccgatttagcgcacagtctcttcccgagatgagcagcacatcgctggacatacccagtcgcttggcaaatttcagttcttccggaaccaccttgtcggtgaaaccgacccatagggctcgtcgcagtaaagccactccgggtagggcgagttcaacattgtcggcgtgcttgttgccgtcgttaccagttaagatgaggatgcacatggtgcaaacgtatgtttcgggtagattcttggattcgagatgactacatcgtgagatcttcacggtcagtctgaggagtccgaggcggatgtcgttccgggactgacccggtacaaggcaagtggaaccattcctcgcaactctcgcatgctaccatggtatcatcctctgctgggtccccgcagacgcagggatttttcccagtctttcgaatgggcttgcgattttccggcgagacctgcgacgtctgctcatggtcggcgccgcttttacgtggggatcgtctttgagaactaggaagtcgagaattctcggcgagtgagtctattcgtgctttcgttggcctctccggttgcgagaaagatgctatcgagtccgattcggcgtctctctggacatccagtgcttcgggttccacttgaattgtttcccgtatctcgattgtcagcgataatcagagaagtggtccgacatactcactggattcggcttgttctaccaaagcagcttctggcgcgatcgccgaggaaactgctcgcatcgcaggtaagaatcgccttcgatgagccagagccgacaaacagaccgacctggatcgtccaattccatcgcctcaccagggaccgagagagagggcgttcccattcttgacggctggtctcctacagtcacagcgttagggccttcctccctcatctccctaaacacctcctgtatgtcgataggctgcattagatgactattttcaccgttcgaaaccagggttggcgagacttcttgggtctgacggaaattttggactagaggttaatgcttaggccttgcgcgaactgattgtacgtgcctgtctatcaacatccattgcttcgttgccaccggcagtattggtaaaccttcggcctgcctgaataagcggctgtccgagcatctctgcgggaatctgcacgatgatgccgtcgtcgttgatcattccataaggctgtagactagcggttacttctgggttggccggcttcggcacatccgatcctccctcttcggtcacatacaccggttcgacaaggtagcggtcattggcatcctattgatgacgatattagctccaaaacgacattgagtgagctccacgcacgcacatgatcggccgactgtgtggaattcaaattcagctcgatttgtttcctgaacactcgtgctctgaactgacccagactatctttcttctcagtgcatcttcgcgttgttcttcgacctcttcctcccgctttcgctttggtctgacaaaagagactggtgaatccactccaaacggttgcccgttttcttcctccacatgcgccgggggagggatgtacgacacggtcgatgatattttgaccaccatactagatccgaatgtatcatcagcgatcacatttaacacctcccaaatgaccaaagatactgaccaggtgtgcccagtgtctatcgcccctagaaaggtgctatccggtcgttcaaggatggtatgagtagcgaagtgccaatcctgcttttcaggcgcaagagggacaaagttcggggcctcgtaacttcaggaaggacgacatgatatcgggtatctcaacctccctcgaccgaggattgacgtggagtatgccattgctgctcactcgtccggtgcaaattcgttgtagaccaacttcatgttcccgtacttttgcgctgcccagccccaagatagccgcgtacatcaatgacgatctgcgagctgtaagccaacgactggcttaccaggtagatcgtccagatcttgaacgaccatcaacatggccctggtaagactcttgatggccgtcttgacttctccgaccgtctttgtgccgtgactgctaccgatggccaaacttgaaaggctatcggagatggtcatctctggcactcgaatatcggtaccgggaaccagtgggtaatggaaagaaatagtaagggtttcaatcacgctacaacattggaccgtgttcagccaagtattcgagcagcggtcacagtcgctgattcacttttccggttgatccgggtcctttatcatgatcagatattatcgaaccgcaattactatataacttcatgactatcaagctggacttaccaaataaatagcgaagacacaggtcttgaggtattgcttctccacggcctccatgataccatcctgtcgaaaccagactgcgctaagacggcattttcccctctggcgatcaaaacggcttacgagccagccgataactttatcaccttccgccctaagccgagtacccgacaccatcagctagatcctccgttttgatctggtccttgaaaaagccactcacgaaacgccttttttcaacaccttgacctttgtgcccgacttgcccgcttgactggcggacgcggcttgagatcccggagctgccgggtcgagctgggatgaggcaggggtatcgggcgcagcgctggacctttgaagggggacgtcgtggaagttgtcttcagggagaaggttcctgcatattcggtaaaagtagaagcgtttcgagtttcgagcgggaaaaggaggagttgtttgatggcgtagtcgttggcaggcgggtcagagttgcgatgagccaagcggcgcagaatgagtggttcgcagcggatcttacctcagataagatacgctcgcaaatgtcgcctgaaccatacactcgatgatcttggtactctgggctcggctcaagatggctcgcgagctcgtcatgatgcctgcctggtcgtatatgggaggcagctgctcgacgtcggtctgggctgtcgtcttggccgtcaccgttttcgggcgtattttctggaaattgatcacgcatgtcattggtcactatcaatggtatcccgcttctcagctcgtgacttgcctgtgcggtaccagccatatttgcgtcgtaatttcgggagtgctaaaatagcagaatttgatggctttgtcaacgcgggcgccggtacaattcggaaaaacggcttacataatctagatcggagagtccgagtctattccaatgacttaatggcaggttgtgtactttaaatcgatctgatggtcttccgaagtcgatttgatgagaattccaagtgttcgagtgctcgagatgaacgctgatcgaggttgaatcgaccggaacctccactctgaagtgaccggaagtaaatgaacacggacatccatcaaactattcaatgtccgttttatcatctatgtccgtcaacccccctccacttccggaagctaattcgagaaattcagtcaacctcgacctgattcaccgaaatcatcaggagatgcaagctggtcgtaacagccaatctagctactagctacttgatcaaccggctaagcagcattcgcagaatctcgctttggagaccgacgtcatttcatcatgaggacgtattacaactttctgaccccgtcattgacgcccaactcggtcgtcgacttttcactcccggacttgcctaaacgaggaagcacgatcgcggctcagtcgatcgtcaggcaactagaagtcggggaatggaaggaagccgaacctctaggacatattaaacggatagctgtggatcaggatcagaggatcgtgagttttctgagcggtccgagagagcttaagagtactccctagaaccttggtattgataacctatgtttgatatgtttctgaaaccgcttagatcgcactggcagataccactcacaggatcactctgacctctttccctgaaccccgatctgctcaggatccagaagacaaggaagcagagcaagaggaagacgaggacttgaaggttcaggctcaatttcaggtcaagccgactaggaaatccgacgcttgggtcggtctggagatcttgccaaggtcagtttcaaggcccaacaccggtctgggatattatagcccaactgaccgttctttcggatgcgtgcctttgctcttctagtgggattctttcgaccctctcctccggtattgtctcccttcatccatcaacctctagctcatccaccccgcctcaaaccggtcgattaccatcccctttgaattgcgcacagagcatctccggaaaccaattggtagtagcagggaaagatgtggacgtctccatattcgatatcgagcggaccttggccaaagggcccggtgatagcaaggttgtcaaggagacgagcaagaggaagaagggagagttggaggatggagaagtatggcgggcgaagaatgtgagtatcatgttcatcggatccgcagaaaccgaaacacgccgatcaatggcttactctggaacgaaaaaccctcagcttcctaacaacggactcagtctccgtgtccctgtcaaccacctctgcctgactgttcttcccacacctgcgggctcgaattcgacgtcgatcgttacgggcaccaagtcgggacatgtcaggcgatatgacactcgccagaggaaaccggtggatggatggaaggtcgccagggaagggggcatcggagcggtccaagccggtttgaacgagcagtgagttttttgccctcgagtcggcaagcaagagctaacgaggcgcttgtggtgattagcgaattgttctttgcggacacttcatcactactcggagccatggaccttcgcacgggtaaactgctctatgcctatccatcccagacttccaccgcccattctctccttcccctaccgaccctgagcgcatacaagaaatcgcggttcgagaaggagaaacgggaccgggtcggattggtgactctgtcctcggacgcgacgctcagagcatgcagcacgactgcgcctcccgaggagagcaagaagaatgtcacccgaggagaagtcttggggatgatcggaggggtcggatcgggtggattcggatattacgggtcgacagaaatggaggagctcgaggacgaggaggaagaggtcgcagcggacaaggacggagaggctggagaggaaggtgacgaagaggaggtctgggacgacatggctgttgtggaagaggacgagggtatgggaagtgacgatgacgaggacgaggatgcggagagtagcgaggacgaagcaccgcaaaagaagcgaaagggggggaagcggtagtggactattgcaggttcggaccggctcaacaggttgcgatgagatgcaaagcatgacattacaatgcatagtaccatatgtgcgctatcaagcggtggtacaaagtatagacgggtgaacagacgcgattgcgctgcactccttgaacagcaagtaatttctcggctttgtagcttgcaatatgctatcggtattgacgaaccgatcagcctcgctgtcctggcttacagcgatgtttcaaactcccactctcagcaatgacaacgactaaaagtgtttctccgaccatccagctggtcacaagagatcttccggccagttccacgtcgacgatgtcctctaacccatttttgaccctatcggcaacgtcctagtcttgcagaccgggtcgatcacacttgcataaccattgcttggcatatggcaggcatgtggctggagtaacaagacgtgggcactgaacccttcatgcttgtcccttcaactctgtcgccgacaagtggagccacgaaagtgcatatattacatttacagacgacatataacgcacaaaataacacataaattcccgttgccacggcaagactcgcgatcgaatgacagagcgacgaatagagagaccttccgaactggtcttggacagcaaaaccagtccgcccatccatccctcgacgactgcctagtcttccatagcattctcctcggcccgtcggatacccaagctgaggttgctaggcttcactgggctggatgcgttcatcgaagctcgtcgctcgttggcatcgcctgagaatgggttctgatcccgcaggttgctaggcgagctaggcgtattggcttgtgcgccggttccggcgaggtgatggttgatggggaaggatgagggaggtacgctaccgctcgtcatcaagggcgagtgggatccaacggggggtgatattttgttgctacattgtgagcacgaagtgtctcgtcagccgcttgacgcaaatgaggcagggatcatcggaacaggtgacttacgtctcggctcctactccagcaccgaccggaatgccggccttgcccgagccgcttccctctcgcttggcgctgaaactgtgcccctgaccggcggcgaccccagctccgaaactggtactcgggctcaaaccaccagagggcgaggggctgcctgcgttaggccgacccccaggcgaggtgccgccagctccggtagccagagtcgggttgcttgaaggagattgagaggaagcgcgagcgttgttgttgccgagggcctgggaggaatggttgatttgactggcgttgccacccgggatgggcattcctcgaggttgaacgccaggagggggaggactcgttgcgacagggatcgatcccgcaggaggcgaaaggatggtcgagttggtgggcgaagacgagagcgaaggaggttgggcgtgcggtagcctaagcaatcaatttcattcagcgcgagatcgcgtggagtcgaattacccaatactgacctctccggagtagctcgttcgagtccttccatccctttcaagccctgtccaagtccacctgatgaccctaccgaatctggcgaagcgacaccagccttttgcatagcatagtctcccgagtcaaagtatttacgttcctgatgggatcgccggtgggttcgagtcagttgattgtatcgcaaagcgtatcaagcgagactgggtgtaaactcgccttcatcccgctcagcatgttcttcttcatgggcaacttgccgtacttctccatcaacttcttctcctgctcgtccattgtctgtgaaagagaccggacgcatcagaataagccctggtcgagcagccgccgggaggggtcacgtacagagctgtccttctgagtttgcgatttctgaagaagaggacggtaatggcaagaggtcagtgtcatgtatgacagtaaggcagaccgactaccgctacgataatacactgctgagagctcttttagcgaatgcgatcgtgacatcgaccattgctggccttatttttggcgggagcattatcctaggccggctctgctcctgacatgtagtatttgatgtcgaggatccgaggtgcacatagcctggctttgcgaagtccctcaagttacgtcccccgccgttatcctggccagccgagtacacaagctgtttgactgacaaacccgactctcacctgcagcaaaggattcatcctgtcgaatagcttctatagctctcttcgtccggttattgtttcagtgtgaccgtcgattacagattccgaatacgagaccgctctgttatctgtctgattcttcggagccgaaacttcgtggtagtatctaccgttggcggtgtcaaagggagtcctctaggtcggttgaacgttcgagatataaccgttgtagagtaggtgattgatgagactcgtccaaatcgagtgcgggtgagctctttagtgggttctaagctttcagttgagcaagatccgatgagctatctgcttgtgtttagtgtatgtagctgatcgttgcgatgaccccgtccaatgtaagcggaggaggccggggaggcggaggtggtcgtggccgcggcggggcgaataagagtagtcgaggtcaccagaacgccgccagaaccagaggacatgatcgcaagatggccaagatgggtgctccctaggtgtttaggccctggaggagaccatgtcacgatgcctcgatgcgatttcaacgatgaaacgatcaattttatgcgttctcgcgtcgcggacggggtgttgaacgttcatctagctgatgtacaagccagaacaagtagctgtcgaaatggtcgagctcaaaagctaaggacagcagctttagtcttcaaacaccttgaaagatagagcctgaagagcatggcgttcttcctgagagagtgcactatcggtatcgtgcacgttgatgacgatatcatcctcggagcgcgaggtatcgccgaatggctcgatcaaccttccctggtccgtacaccagcgtagagatcacgcagatcctcaaattgacgatacaactaatggtgtcaatagagattgatccctcgttacggtttgaagaagtcgacggcgccatttcataatctggacacgaacggcggagaaggctcatccgacggaaagacagccgagagagcgttgcaatattatctggttggatcgtccttggacgatgctctcgcagcggacgcagacgacgtcgagatcttctggccattcagatcggagaaccaagaatccgcgtcacaaggaggtatcgaggacctcaaacgaaagaggctacagaaggatgttgacgaggtcgactggcgaggtcgtgaggccattctgtgagcatggcttgtcgacgttgcggccagatgtatcactgacaagcagcctacacctacagtcaccatatcttcttccgagaatggggccttcagcctcaaaacaacacgaccgcacttctcctgctgctccccgctcacccaccagttctatctccttccaccctcgaaaactggtcccgtttggctttcgaatctctcaactgcccagctttccaccccatgccttcctcgatcgcagccggatttggggtcggcgtcgcctcgggtctcaacgtgcatatcggcttgaacacgaccgacatcatccccttcgtggacagcgtcgttcgaccagaggctcatattcgggtcaactgcgggacgcgagattgcatcacctactttgccgacgtcctctccaaagacgaagctgtcagacggtcggtcgaagaactttcgcaagagaacgaatcggatgggtcgagcgcgtccaacacgtccgaattgctggtcgagcttgcggaaatggtactgcgggaagaaacgcctaggctgttggtccccctcgcaaatggtcagacggtaccggtcggcgacgagaaggaagatttgacggaggagggcgtgtttgacgtcgccaaggagtgagtttctggcctgtatgaccatgttatacgatcaatgactgacacccggcgtgtactcttaggctgacacgggcagacgcttcgaaagcgatacaacagctcaaggaagctcgaagcaaaaagggcgcgtcggcacaggccgctgccgacaaacaagccaatcaaagagcggcacaggccgctgcacaagctgcagctgaattggccgccgacatccagaagtttaacctgagaggtcgtgagatcggtatcggtcccattcgacaccgagcgtgcgagcctctgtatcgggctttcgacaaccttccatacggaaacgcccgtacggtacaagagggtatggctctggccgtgggagcgatcgaggctcgagaacgtcagaacgtatgggatggggtggtcttcactggtgaattggccaggatcccttgtgagtcgagctgagctggcctcgaagcccttctacatgctgagctaacttaccgatcttcgttagcattgtcatttgctatcgtttcgtggctcaatgctttcttggtgtccgaggccaaccgcgataacgacggtcagccttctagtgtgcggatactgaagttaccgtaagccacctcctctggctaccctgcatcggacatactcttacgctgaccttgtcatgacagtgaatacttcacaaacctccgtggccaagctacgaacctcgcgcctttcttaggcgcgtctctcgccgccaaggttagtcgatccgttttcccagttaaaatgacccgctaatcgctgtcccggttacaggtcatcttcagcgataataacaggcattgtgtgaccaaggtcgattacaataaccacggacccgctgccatacgactcagcggagggggcgagtgatattgcaatgtttgggcttggatctggtattatatgaccgttgttcaactacgacgcattgtacaacacctttaaggaccattagggtacggaagaatctctggcatattatagcaccgtcgtgttgcttgggcccagaagagctagggccgtctctaagaaccacgactcgtgcttgataaagtgcacaaccatggttccgcctcgttcttttggatcgttgcggaatctgacctgccgtgaaggtcgtctttcgtaagtcttggcggccagcgccgcatcatcggcgtcgctcttccaaaggggtatgctttgtgcgttggggtgtttggcagcgtgcaacctggagaacagcgacatctcgctaccctcgacgagggcttctacttgctgtagagccgtcatgtgttcgaaaggcggggcatatggggagccaaagcgagagacggtagagtatgttgccgcccaatgctttcctcccctccactgcaattccaaaggggtcatttgctccgtatcttcagatcggacctcgtcgatagtgtttggaaagaggaatccatgagagtagctgaaacatccatgtcagacgattggcctgatgcgggaacttccagcggtacttacaccgtgcctgctttagggtgatcgtagattgcgcatctctcactaacccaaacgacgtcttcccgctgcggatgcatcttgatccacttagtcgccagcttgtcctcctttcccttgaccattttacgaagcggttcgtaatcggcaacatagcggacgaggtcatgagacatgccatagcattctccgcccatgaaagaatttttgaccaaatctgatcgatcgtggaaacggaggtcgagccacgcagtcagtacgattcatcctgccgagccagcctgagacttacatccaaaaaaggtaagcttgcgaggtgctacccttactctacgctcaaactctcctagtacaatcagcgcatcgtcatctgccttgaagatatagtctggacgcttctctcccatgtagacagcatgcgcagctggatccagagagatgaaattaggcggccgagacgttgacctgacggtatggcctacttcgtcctgatatccggattcgagatttatatcctccatatccaaatcacgatgagaagggtgttgcgaagtagatggtaggacaaagctgtattctggtacggtcgcatgatccgcagcccaggtgaaatacttgtgcgttttgcccgaattcatgttttcctccatgtccaggatgacgatgtcgccgaaggctacagccatacctctatcagtctctgatgctagaacatcagtctttcaatactgctcactgtcgttttccaattccacttcctgggcatacttctccttcggtcgacccatgatgaaacgcacactgactccctcagtaccccggactcgacttttgggatgactcccgtaggtctgcctgataagcatgcgcttctccctcgacttgtccatggtcatgattccgatgaagataccgacaggctccagctggtcaacgctgtcatcctcggcggaatgaggaggcttcgcgttcgacggaccccatggccaagcaggatgcgacgaatcgatctcgaccaaaggttgcttggatggactggtgaagccttccgttattcgtgccagtatcgatgaacgacgggtaggtgaccttttgagcgcatgatagctgggttgctgagatgcgcagtactgccgccagggcagaggagccttgtcagggttgagcgcatacatgaggaatttcgttaatgtataggcgaaaaggcccagaacgacgaggaagatgagctgccgaaagcaagccgagattcagctcgtttatacggacgaatgaccttcgtgatcagctcacaagtgatcgataaggtcgagtcgtgaccagcacgccgagccgtctccatatccgtttgtggacatgacctccaagatccgtctctaccaagcgccccctgacatctctcgatcgtttcgttcgcttcctcctcgaagcatttccatgctttcccttgacgtctccatcgcccttggcagaaactcccgtctcgaccaggcgatattcgtcactcccggcgggtgcggcggtcgaactgatccacgtccatatccggtcgagaccagtccgcctgaccggacgttcggagctttgggatgtgaatgtaggttccgaatagaggagttgcctgttgtcgttgtccgattctgactcgtggtgcgacgctggcgtatcgctcgaattgggttgtatggcagatgatgtagatcccgtcgtgtcgtcgtacaaccctctactggtcttctcgaatgtggctgctagcttgtcttttgagctagggataggatccagatctgtggtctgaggagtcatgttcatttgccaaacgttgttactcctcaagccgagccctaagttggcagcttcggctcggtccatcagcaagtcctcctccgtggctcctgctcgtaatcccgaacgagcgcgtttgcctcctgtctgactggttcgattcctagtcaacgagagtgaaggtctggaggtatccgacaggtcgagctgtgatgtgctcgccgagatggtggtgacgtctgaagcgtacccggctgtcggctgttcaatccgctcagctgcccagggcttcgacatgcggatgtttgaggaacgggtcgacagatctagcttctcgcagcatcaatccagctaataattatgaggccgactagagtggtgagaatgatatgaacagatcgtagcttggccatcgagagtagtctcatagaacatcgcacctgtaatgggccttcaggtcagcaaccagcagccgagcgcgacctgggcggttcagcggatcaggagcccttctaacatgttcgaacaccttctcttatgtccagacacaggctatagcttcgaagcagctttcgtcgtacccgctgtcctcccataatatcacaatccatagtcttgtcaggcctgggacgctagacgatcaacaggcttgaaccgtgaaggaagatgccgaccgcaagtaagaatgtccgtgccatttcttgacgaatagattgctcatcttgacggcccaccgacagcagccgaatcctccacggtcaagctgcttgccgctgtcggagtcactgtgctctggacagcggtatggtccgtatctctcctcggtctacacactgcgtaagtcttgatgtccgcttcgtctgcctgcaaactcggctgaagaagtcctatctgtgtctgcaggaggaaacgctaccagaaaaggccgtacccgcaccccagactcttatcttcagacgtatcacctgaagatgtgccaggagttacaatcatcagacctttgcttggcctggatccgaacctcttttacaatctacaaacgacacttgcgctcgaataccctagcgacaagctacagatcatttttgccgtacaagacccttcggacccggctctcggcgtcgtggatctattgttgaacgaaaggattggaggagacccctcaggtccgaaacgatgggagcatgttgacgtcaaggtcatcataaaccccgaagttgttggaacgaaccccaagatcaacaacctggtccggcccttcgatgaagccaaatttgagatcctgtgggtcgtcgatgctaccgtttcgatgacgagttctatgctcgctcgaagtgtcgaggccctcattacaccgccgacgggcagaaaagctggtagtgccacttcctcggaaagcaagctctccgtcgaaagggacggattgctaagccccaacgtgcaggtcaaacacagtgcagaacatagtggggtcggtatcgtccatcatttacccaacgcatgggtaccgaacacgacgggaaagggcacattcggatcgcgcttggaagcgtgttaccttaatggcgttcatggtcgaatgtatctcgctatcgtgagtcaaccaatggcacatatatggtatgggttctggctaacgactggtcaaattctccatctcgatacctagaacgcgaccggtctagaatcttgcgtagtcggtaaatcgaacatgtaccgcaaatccaccatcgccgccctctctggaccatcaggtgccgacgatccgaaaggcttgcgggccttctctccctatctgccggaagacaatctcattgcgcatggaatcatgcatcagctcaagctttctcacgccatgaccccggacctcgctatggattgcctcggaccgatgacgttgacccaatacatcgcccgtcgagtccgctggatcagagttaggaaaaagatggtctttggcgcgactttgatcgagccattgaccgaatcgatcgctctcggagtggtcgcttcgtgggcagctaaattcctcttcgggattcgaccgctatggttcttcctgttgcacgagtcggcttggacctggatggatatcatggtcgtggccgccttgagaggggagtacatgaagggacaggaattagttgattggttgctagtctggacagcgagggaggcgctggctctgccagtctggttgaaggccatgctgggaggagatcaagtggtctggagatcgaatacatacaagattctgaagaacggtgtgtcacaaccttctcgcaaggagacaccggcccaagctgattacgatccgtcatatcaggtgaagccgtgaagatacaatagagacacacgcacgagatccttatacggcagagataagaatatttccccgtaaatgattgcataggcgagatctaatctgaacccgtaagctagcaacttccgactcgatcctgcaagttcttcttgatgttgcgatcgaatctgtccgagggccgggtcacatatcagcatgagtcttgagaaggtgtttgattcgccagacttgcacggacctgttcatgcaagactgcaaggcaagtatcccaaagacgccagtcagcgcatcagaatgcttgccaggcctgtcgtcccactcactttcttgtctctacccacgaccttggcgacctcgtcccagttcggagcatcgcgcttgacgtacatggcgcagaaaagacgccaggtttctaaaatggagcaaagtagacagtggtaggagaagttagtcaggaaacagagctcatcattcaacctggcttcgaatacattgacgaaccatcaggggtccacggagcgctcttgccattcttcgagggtgagccttgctcggacgcagttccgcttttgggaggtgacgccggatagggcttctggtcttcgccctcttcagtcttggctttaggcgcacgtggcatctgtgactaatttatggtaaccgagataattctggtgatagggtgattggaagggtagctgagggtgactatcaggtagagcgaggtgaataatgcagtcatgctgtcttcgatgcgggtctctctcatatcatcgtagacgttgctttatctcttgctctggaagagcgatcggtgtggtctctctagcttctcaacattctgtcggatccatcgcgcctagtctgcgcctcgctggagattgaacaagacacatttcgtggaattcgtggcagatcactcgtcacggttcaaaggacccccacgagttctccggcagatcagactggatcatcgccagtcctttcgatctcagagtagcatcagctaggacaagtgcatacatcctcgatcaacaatcccgaaacaaagcgagcttttgtggtgacaagtcgatatctgcagatctgcgccaggttgcttacaggcgagttgacaggtcgggcgagacagtttcctctccaatcagatgaccgattcttgcttctcgcgccacttttgtcatttgtcttcactctatcgtagcttccaggcttgaggacacaacatatataaagaagaggctaagactgtgctgttcggaaggatcagctggctgagtagcagctcgaaccgctgccaaagatcgcacaacccacaatcaagcgcatatacatcttcacattcacatcatgcccagaacccctaaagcaatgaaagacgaagatatcaagccttacgaccgagaggaaagccaggctagttcgaaatcgccttccaaatcgccgaggaagacatccggaggagacgcttggaccccggatcaggtctgggcgcttttcaatcagctttacaaaaaaggtgcgccgtcttgccgtgggtggcagagttcgaagagggtacttagggctgaagaaagaatcattctgctacagacaaagtcgattggaaagcgatctctgaagtggttggcaggaacccgaaggtgagaacctattgcgcttttgctcaggataagagaagtatcggatcgtcgggctgacggcgttcgaccggcctggatagtcgtgtaagaattggtcagccaagcgagagaaaccgatagcgaagcgttcatcttcccctaacacatacccgccaattttggcttctctttacaatgtagctacgagggattgttcaagaaacgtctcgagggagccataaaggacatggttggccgtggatcttaaacttgtacactccgtcgacgggtatacacttattgtgccgaaatctcactcccacattatgatgttgacagttcatttctcagtgagattcatgcctaggccgatttctttcgggaacatgcagtagtatcgtgcgtgaaatcttggtagcgcacctgagattcgtttggggcctttgcattcgccagtcgcgggcagtcatcgactcgtcctgaagatgttgccccacgggatccactccggatagagagtttttggcccctgtgccctcaacgtctcgagaactatggcgaccttgcgaaccataatgtcctatcgatctccccctttagcgaactctgaggatggtcgatcaccataaaatttagcgcggagacgatctgcaacaacgggaggaaacggacttgagccaattgcgatcatccggctcgtcatgatcttgggtggcccggttgccaggtggatcgacaagcacatccgaggctactatataggccatcactctccgtctttgggaagacctgagcgttggtgatcagggtcaggtcatgcccccaaataagagtctcgcgccatcatgccaaaagccgccaaaagccagagcacaccgcgtacctcgcctgtcaaatcggagcgtgccgatgatgatactcttgtcccggaccagaaaccgggctccgaatcacccaagggcaagggaaattcctccgcaaaggcctggacggcagaagagacgtgggccttgtaccagatgatccatcccaagcccgcggaagtatcttggaaggaactctgcaagcagtttcccggtaaagatgaacaggtgggtccccgcccaactagctatcaatctttgcctcgtgcatatctgagtgtcaacatctttgccaaattcaagagctgtcgcaataggtactagatcggatttttcgacgagacgttaccggcaaactgatcgagtctcggatgtcctttcacctcaggtaccgccgtactatcgctcccgccgtcgagagggctttgaggaagccctagatagcgcctagtcgagagtatctccgcctcatgtgacgatcatgcttggtgttaccatgatatcgtgggacaggatggatagacgatacaaatgtagcttgtatgggcaaagagaaattatcgtgacgtctaatcttcctggacctctgcgagggtaccacgtacgacctctccccaacctgaagagccgcgatatcgtataagcaaaactttcacgaaccgagcgcgttcgcagcagcaccgacttaccaaccaatcgccaatgcttgtcgatacgtcgcgacagcgccaccttgtcctttgcctgggcacaagcgggagcggtcaaggcaatctttgcgagatctcccttgactcccaaaacacgtcctccgacctgagaagctccaacgttgacgaagagctgctccccagcagtcaatttctggacctgtagaagcgaaacatagcatatttagcaaccgtttcgctagaaatccgatcgacaagcgattccgccttacctttgcctgcttcttgtccgtggtcttcactcccaacagtcgtcgcaacaagaagactgaaaagaacaacatcagcttccattgcattcgtcacccttttgttggaacttacagctgatctccaactcgacgtagatatcggcgcccttgccaacagcggtcatgacgttacccaaaagcttgtcacccttgcagaggatagggtccaccaaggtaccgacaccgataagacctccgggaacggcgaattgcaagtcgttgccctcggcgaagagcgagacgattctggttctcaggggttgacagatgaactttccggtctggtcggtaaagacctttcctggtcggatttcaacctcttgtccgatctgatgtctcattggagattaacgggtgatgggtcaagtatcattggcaacctaggactgaccttgaacactccgctcaagatacttcctccagctacacctcccttcaactcgtcgacggtagaaccaggcttgttgacatcgaaagatcgaatgacgatcaacctggggtcggcctcgaagtcgtgcttggggacggggatcttggtacagatgtactcgttgacggcgtcgatgttgtatttaagctgggcagagatggggatgatgggtgcgtctcgggcgacagtggctaagatcggaatgcggattagcaaagtcgttgcgactgcctcggatacggccaaaactcaccctcgatgaacttggcaatagccttttgttgctccaaagcttcggcttccctgacgagatcgaccttgttttgcaagatcaagatattccgcagcttcatgatctcaacggcggccaaatgttccgacgtttggggctggggacaagattcgtttccggctacgagcaaaagagcggcgtccatgacggcggcacccgtcaacatggtagccatgagaatgtcgtgtccgggacagtcgacgaaggagacgtgccttttttttcgaaagcgcgaggatgagccagatattacgggatgagattcaacgtgccagctcacctctcgaggtgcatagtacctccacatccaggacgttcacaagcagggttgggaggagttgcagagccgtacgacttgtagttgccaggtcgagggcaagcttcgttgttgcatttgaagatctatggtaagcccgggcgaacgagctgttcagcgggacgacatcatttgtgcatcgagggacatgagaccgaccttggcgttggcgtatcccagcttgatggtaatgtttcgctccaattcgttcttgaacctgactgtctgcacaccggagatggccttgacgaccgtagatttaccgtgggctacgtgaccaatggtaccgatgttgatctatagcgaatgacataacgcccgcatgtcagtcctggttgacagacgatctcgacaggatcgagccggagaccgatctgacgctcatcttctgagcttgttccgcatatggacgagcgcacatcgggtcaccttgaatctcggccaccggactcaccgttgcctgtcggctgatgacctcctggctcaaagcggtcaactttgatgaatcaatctccacattctttacgccctcggtaacttgctccacgttggtatcagcgatcttgtccattgtctatcaagttgccgccggcttttctttgttgcagagttgttctagctttgtcgtcaaatgaacgggaacggctatgtgttcctttttctagcgttacgaccgtggactatcctctctggtacgtctacgtgagttctgcaggtatgatacgaacgtgaacccggcaaatgccacatgatctatgtcatcgtgaacagcatatctcgtatgtctcgaggaagagaagggggatcccacttttgcgcttctgattggcgcgatgcgcttccacgcgtcttaccttaaagtgacacggggagtgatctggggtgcatggccaaatgtattcgtcatgtcgatcttgcatctcattcgaacatctgctctggtgctttgtaattcagggaacaactggttttaggttatcgaggccgaggggtatctgtgtcatcatgccggtgagtgttgctattgctgtgcccgtggtgcaccgagtccgagtgctaagtccatgtcgtgaatataggctcgaacgtgagtcggagaacgccgtctgtaccggaatgtcacgcccgcagtcttaacggctctattccatgttcccatcctcaaaagcattctctacgtgaacggattccatccaaacactcgagcgcgtgatctggcctgggaatttgagaggcgagtttgacataatcgagcggaacgatgtacatcatcgagaggacacgcgagctaaccgaaataattcggtcatgtgtcagatatggccggctcgtccgatgtgacatccctgcgacaagcgctccgaacaaggacccctattctttcattgaatttcgccacgaacgagatgccgaagacgcttactactacatgtaagcagctacctctggaaacgcaacaatcatctacccatcgaactgattaatccgcctcgccgttgatcccgtactaggcacaagaagaagatcgacggctacgtgatttctgtacaatgggcgaagaaaactccagcccgagactggcgttacgaacaagctgatggtcatcatatccggtaaatcatgatcagataaacagcggcgatgaaagtttgaactgacctcgatttcagtagttaccgtaggaccaaccagagggaagatcatggagcactgacgagggagcaacgtcgtgatgtctacaaagcagagagacagccccgaagcagtcatcgacgatccgagtcgcctgggccggtccgtcacgatagaagtcgtagccgggacgagagggagtctcggagccacgctagatctcgctcgcctacccatggccacaacggagcatcgacctcgcagcgattgtcgcagtctcaagctggaggaaggaaggccagtcgctctcccgtgcctgagcaagatgacagtagatgaacggtagtatacagctacatgcttgacacgccacacggcacaccgagacagatctcgattaccacgaccctagaatacgcacgatcgccacctgggctatcaatcctttacgaccaccttatgtcatcagctttggttccattgctaaagatccatatcatataaaattcatcatttgtacgtcaaacccgcttgacccgtcgtccaaggttatactattcagacgtgcatcatcgagaacagcgcgtgcaaaactagtccaccttggataccccacctggagatgaacatgcgagtatgcgcgatcagtgtcaaagggtcggctgacgatgccaattggtctgtacttacagtccgctcgttacttcttgaatcgcgtcaaggaaagcgggctgcgtacaccatgacacaacacgttaaagcgtcagactcgtttgtgacgcacgtcgctcgtcgcatgccgcgttactcacgtctttcttgacggcatcccaattggtttgaacccagacagtgactgtattgtggaggtctttgtagcggtaagatgcaaagagcagagacatggctttggcaggtgtgagattctcgagcaaggcttgatgggtgacctgttgcaattcgtccagactgtactgatcggccagtacataggtccggaacgcagacgctgacgggggaggttgagtcggatgtgcgtgaggatctttgaattgattgactgccggaagctgaggcgttggacgcccttgggcggctgtcgagctggtaccccaacccccgatttcttggtcctcttgcaccgaagaattagcatgattggcatctgccatttctatccctgaccttcctacgtcggaaaggtcctcctggagcctctggctaaagctaccaggaggggatgattcggtagtgtcaggactggcctcctccaggttggcgctctcgtccaactctgtctcgtcgccagagaaagcacggtgccaagcccatggatctttcagcggcaaatagccttccatccccagtgtcctcttggccatagggtcgccagatacctcgtaccagtccaaaacctttcggtggtcctgatgaagaaccattcgtaatcggtaggagtaaatccaagccaaagtccagtaaagtgtcgcaaagtccgtatcctcgcagtagatcgtctcgatgcgcctttcatccatcgagtcggaaacgactttgagacgattgtcggccctgaattcgagcaagtcccggaagtactcgctgcggtgtttcaggatgtcggagtgagcgtataagacgcgtttgcgaatttcgaacggggccgagctgtcttgagctagcgcctgcagtcggccagcggccaatgtgttcgagctgccggcctcgaggcagacaaatcggacatcgccggtattcttgttgtctaacatgctggctaaaccgcataaaaggttcgacggtgccatctcgtcgtttaagggtaaaggcgggggagcgtaaccgtttcctgtgatccacaaagacaggatgaaaccatcgtctgattggacgcgtgggtctgccaagatcgcatctattggaatgcccttgcaaactatcgggaaggggccgatgattaacgagacccgaacgctgcgatgatcttccacttaccgggctcagcggtatcgagggcccaggtcgcccgagcctcgcttagccactctgattcgccaagcgcacacctgattggcttcgttcttatgatgatgaacgggaccgacgcttccgagttgtatggcgttcgagtcaagacgactttcagaccagatcgtgttaaactagttgtcgagcacagctacatgggagacgtaccctcgcttttctggtctagcccagccgctatggatctcggaccgctagggcaggttagcgaagcagaatatatcacaacaagctcaaccaggtatagcttgcacatggccatctcgtagcggccattgtaacttgtcagacaccaaatgaaaccccttaccggggaattctttcgtggaactatctgctgttgcctggcggaatctgcccacgccgcgaatggttcaatgtatggcctacaaaggaaatctcgatattgagactgaactgatcagtttgatcagaagtggtcagtaactcacgtaggaacgcgagtccctctctagcgactcggagacggtgaggtactggctgtccgccgggctgtccgccgaagaggtaccactttgaatgaccgcctgttcatgagaggaaatatgggatgcaatgagggaccgattggcggggctagacaatgccggagtcatcgcgatcgcagaatgagagtacggtgagcagggcgtgaattgatgtatcagggcttgtcagtcgctcagtcgttgctcacgatacgtattattgtggcacttcgaggcagcacgaccagccacttgacatttagtcctgcatatgaggatggtctcatagcctgtctgaactatctgaaaggaccaccaaaacccaccttgcaccctcctttggcctctgatctcatcgatcaatgatgatgtgaccggtttcctcggccatgcccgcaccgtctccaacttgccctcggcctgcatcacgtgatcacagtctgatctgatcatccccgcttggtatgcccgaggtctccccatctcgcggatccgggccgtcagccatcggggacaccaagatcgagtgggacgacgtcaagattcatggaaaggcaacaatcccgttgggctgtatgtagcgatatatgatcaagtcagacctgcttcgaaaccgcttgctacttgaagatcggatctttgtcgtcgatcgtaactctgagtaccccatcgcaacgcggttcatcaagatcgaccggactataatttcgacatctctccacaataacatcggcgatcacgagcgaattccggtcatcctgaagatatgggcgtgaagcagtcgatctagcacctgcctcccaaatcgaatcataacaagcaccaccagggcgcacataattccacgtcatagccatggccggagacgaagcagtcacagaccacccggaccagagcgtcctttacaccttgccccctcccccagagaccatcctctccgtacgcaacctcacgctcgtagccaaccgaagcggctccaaactcgtgaggaagctcaaagctcggcggcggagacgaggaattcaagcggaaaagaccagtcacgctggagagaaggcagatggacatgcggccgatcttagacctggcaagggggttcatcgggcggacatcgaggatggaggcggaacaccggagaggggctatgtaggggaggatgggaacgatagacctatcgaggaagaagaagaagaggacaaagaagacgaagacaccgaaaagacggacgatgggagaaagatcattctgaacgacgtttcttgcgaatgttaccctcacgagatgctcgccatgtgagtcccccacttgagaggttctagactttcatctgcttcagcgggggccaatattgatcatctatacgccatggactctataatagcctcggaggttcaggctccggcaagagctcaacgctcgacgccatgagagcctcacctacatcttcccttcccatcgaatccggcaaagtcgtcggattagattgcagctccgattcgagcggcgatgcgggtaggtcattagaggacagggaatacagaaaacggatcgggtttgtcaggcagcaagacttcttagtggagcatctgacgggtaagcgcggtcgaaacgaggggtcccacacgaaaaatgacggctgacggacgatgcttggtcgacttcagtacgggagacactgtactttgtgagcgctcgcgcagtgaaaatcacaagaagacctcaactcattcaattaccgtctttctgcgtatcaggccgccgcactccgattgccttcaacggtctccaaaaccacccgcaaacagatcgttgagcagaccctacaaggcgagtaccacgataccaggatctcagggtaaactagcctgatgggcattttatccgtcattcagaacttgggctgttagagatcgctgataccctagtgggaggagctctaagaaaaggaatctcgggtggacagagtaagtagtcctggatggtagctcgtcaacgacattaactgatgacatctcggttcgctttcacagagagacgactgtctatcggttgcattctggtcactctaccttcggtgttgcttctggatgtaagcgaatccaagtagatgggcgcgagcaagagctgatcttgtatttcgcttacttaaggaagtaacgactggactgggtgaggagcgatacgggactagtttcaacatcaaggacacacgctcatccccgatctaccacagatgcctttactgcctttctcttgctacaaaacctcagcgctttagccaagaaaggccgcacaatcatcttgtcaatccacgctcctcgatccgacgcatggaagctattcgaccggatcgtcctgctttcgaaaggcaaggtcgcatacagcgggaagagggaagactgtctaggttggttcgaaggactgggtcacaccttggaaaccggagtaaacccgcttggtaagccggacttttttttattatagcgtcctggcatcgtacgccgcagctgactagcattcggcggtcagacttcctcatcgatatcacctcagttgataaccgggatcctaagcgggagattgaaaccaaggcctctgtcgccaagctggttggcgcttgggctaagcgtcaagaggcgtcttcgacgaccccttcaccgaccgcactaagtagcgccggtcccgtgcaaacatcaatcgtaaagaagtcgggcaagaagtcgcgcggtcccgctagaagagctcggttcccacaccaggtcatactgctcatccggcggaatcacatcgacgtgtatcggaactaccctttactactggcctttttgttccagagtgtcctgacagcgcttgtcacgggcttggctttttataatctgcaagagaatcctaccgacattcaaagtctcaagactttgacataccaaatgtgcccgatctacttttacctcgtgcaggtcttctggtgagtcgtgacggatgcaagagatcaaatcaacgctcattttgtgcttattgcaggacttggagatattgtgacgaacttatcaaattcgatcgagacaacgaggatgggctctacgtaagtgtatccgctccaaaggtgtgccgttcaatctctgactacagctttttttcgcttagagccccgctgcatatgtattggcagacttcgtgacctggctcttaccaggtttcgttttccctgcgatattcgcaggtgagttggctacggtctagcttcatccggctatgcgctgacaaacctatgagggcaatagtcattacctttttccttgctaacgtgaagaccacgccgaccacagtgttcacggcgtgtgcagcagtaagtagcagcaatagcatttcgcctttgcttgcctgctaattcgtgcttgttcaccccttccagaccttcttggctcaactcgccactcaaggtctttcgttcctctgtgtgagtgtctcacgaaactgagcttgctgccaaacacttatcgcttcccggactctgcaggcctccctcattcgaccttatgcccaagcgtctatcattgcaaacgtgtgcaaccttttccagaccatgtctgctggattcctgctagttgacgttcccgattaccttgaatgggtcaagtaagtacttgtcatactgtcatggtggctctcagcgccaatctaacgcacccaaacaggtatctaggtccccaatactacgcgtttcgaatcattgcaattacgcagttccgcggtcgagccttcaattgtcctaccgatacaggagcaagccttaccttgtgcgacggcgacaacgttttgcggtcccttaacattcctatcggcggagttggtatatacttcggcgagtgcatagcattgatcgccggtttctggatactagcgggcatcgctttgacggtgagtccggaagaatgccgctgccggcatattcccactgaaaggtcgtgtcacatttagttttggaagccaggtggcgtcaaggttagcaattgcgattggtagtgagactatccagctgggtttaatatatattaccctatacagcatgcggttgcaggcaagcgtaggctgtacaacaggagtgatgcgaacgacgcagatgcaattgcgcagctgaatcaagcgaagatcgctgtagaggtatgcacgagcacacatttatggattcttacgtgctaacaatctgctcatctcgccaggtctcttcactgtattgcagctggactagatggcgtccgttcaaggcacctcgccaacgatcgattttgaacgatatcaacatgtcgtttcctggtgcgttccctccgtctaaactgcctccggacacgcctaacacgacattcctgttgtagctggcgagttgactgctatttgcggtccttcgggaggaggcaagagtactttgttgcagatcctgggccgccgaccgatgaaagccggtggatttgcccgatttgcgcgatctggtcaagtactgtatggcaacgcgaacaaccagcaagtcgaagcatccgacattcaagtcgcgtacgtggagcaagaggacgactggcatctgcctgctttgacagtccgggaaacgtaagcgatcgacccgttcgtttagggtttgtaaccgataaaggcgcgctgaaccagctgtgctctcgcagtctgcgattcgctgcaattctccgtttgccagaaagcttcagccgagaggctaagatcgctcgagcagaagacgtgatggtgctgcttgggctgaaggacgtcgctgatatcaaagttggcggtgagctagtcaagggcatttccggaggggagaagcggagactatcgctcgcggtcgaaagtgagcaacgcacctggacgggtggttgtgccattacacctaccccattgctgattacgcctcgctccaacagtgatcaacaacccgtctaccctcctggtcgatgagccaacttcaggtcagtcccgcttatacgatctggccaggccaacgctcacgcttgaatgacaggcctggacgctagcattgctttgaacgtgatacaagcattgaaagatatcgccgcaagcggaaagaccgtgattgtaagttgctttatgtatcgccctagtgcataccgattaactctgaatttgacaggtcactgtgcaccaacccaggagtgacatttggcaagccatcgataacttgctgcttctttcaggagccggtaccatggtcgtacgtgccacattcctgcctctccgtctcgggcttggaactgactcctgtgtgacacagtatggcggcaagcgcgaagatgccgagcgatatttcgacgatattggctatcctgttcctccgcttatgaacccagcagagtgagcaagactccgaccaccgacatgaacgagaaacactccgctgataatttacaatacccaaactcagtcatctgctcgatgtagtctctatcgaccctcggcctgccaacgaagaagcttcgaggtcgcgcttagctgcgctgacggcagaatgggacaagaacaagtcccggacgacggccgaatctcggctttccaactaccaaagcaaaattggatctcagcgctcgacgagcatgttagttgccttgcccattgtcttgggtcggatgtggaagaatttgttcagacaacaagaagtggtatgtgtgcactggaccgctcacaacaattggaaaaactgacctgcgttcgagcagttttataatcgagtgacacaaccggctggattggctttggtctttctggtgagcgaatggaccggcccacaaggtaagacatgccgactgagccccttgggtccatacaggtctactaccaacgactcgggcgagggccgcaagatccgcagaatttcatgggaatcatcatccagacgacgtcggcggtcggtttcgtgggcttgatcaattcgatcccgatttaccctcgtgacaagttgctcttcttgcacggtgagcacgagactgctcgtcgtccgccttgataccaggtctgacttttctcccatctgaacagagcgccaatcctctgctgcctattctcctctgacgttcctgctcggctatacccttatcgagctgcccaacgaactcatcggagccgccctctttggtcttcttatcaacgtcggggtcggcctgcaatcgagcgctcggacgtatttcgaattcgtcatcaccatctgggcccaaatctcgtggggtgaatcggtcgggatcatgttttgctcgttttccgattcactcgggttgtccgtctcgtgagtcccggcgacgggttaagacgtggtacatgagattcaggctgatatcatccgtcggtatcaagaatcgtctcgacggtcttgacctttttcacctcaatctccgggtccatctcattgagcgtgcctgcctggctagctggaatcgcttggatcggaccactcaaggcgagtcatcttcccggagagacaccgctagggtttatactgattcgtctcgatcggtttcagtcggctgtcaaggtacagctgatcaataccctacaaggtctggaggtgagcacaaattgtttcagcctggtgtatcactcaagtctagctcacgttgttctgcatgctatagtttaactgtaccgacgaagaggtacagagtggagtctgtatcgcgcagacgggcgatcagatcttggcgctctaccggatcgaggatcgttcggtacccaagtttatggggatcatggtggcgaccgctgtggtatggcggatattggcgttgttgttcgtggtgtatagggttcaaagcgtcaagcgactctaagtatgatagttcttgtacacatcagagtgatcgatgcgattttgatgtctatgaattacatccgatgtgtcggaagtatattctgacctgatactcgtagtcaacccgtgttgatccccctttctccccgtcccagctctctaactctcttccgaggttgttgtcagaattaaatccacgggaaacaccacaaacgtcgctcgaaagctcggacattgtcactgcacaggacaagtcacagatcggacaagctgaaacacaaggtacaagagttcattagcacctttaccagacatcatttgcccatctctcgactctacttacaaaggagatcatcacgggagccgacgtggacagtcgggaaaccccatcggacgagcgcgaatctcgcccacggtttgacgacctcagatgtccaccaccccggggccttccttttcacggacggtagctactcagcaagcgccatcaacgccgacaccgacggcgccatccactccgctacccgcccaggacatcaaacgtatccagctctcggcacccaccgatatcccagcccctcctcggacgagctcatcgttccccccaacacccatatatgttcctgcctcagcgagcagtagcaaccctcaacccaatggtactccatccacacaacatcggggggtcaagctggatcaggtcgcagagaggcaggcgaacgcgagcgcgaacgggccggccgcaccgggtttgagcgcgaaagctctggggaaacgtaaacgtacggtcgaggaggaagagatcattcaaaacgccggtcaagtgtgagtcaatacgttacaactcgttcgagaatcattgatagcgtcgaatgaatctgaagtgagatgcttttgacgtcggacagcttcaaggataatacagaacgagatgccgcctatttcacggttgattacctacccgttcacccgttcgagtctggtcgggatatcgtggatcgcctgttaccattccatctgtggcagatacacgatcaagatctggattgtcggccgaaggatgcgaagcggcggtcgaatggtgagtccggcgtcgagctagggcaggctagtaaacgataaacgggtccgatgctgattgcggatgactttgctacagagcgtgtcggagtggacaagctggttacgaggcacatatcattaatagagcggttgagaaaagcgcaagtgaggcaggacgatgtgagtcgccctggcatgccgtccgtatacggtccgcgtcggcgtactgattgattccctaccaatttcaaagtctgacagcagggtagacgtaatacaaatctcacaagcggtcgtccagaccatgagagacgccacatcacagcttcaagcacaattacgggacgccaaggccgagaacgatcggataacgagcgaaaatcgacgtcgagacgaagcgcgccgtgcggcctcgatcgctgcgggagagaaaccgctgccgagaccaggacctgggagacctccaggggtggcgtcggggacgccgaacatgagtaggacgacgagcgtgaatggggcgagcatgccagggacaccgggatcggccaagggagcaggtataccaggaggatcagcagcgggtccttcgcaagcctcaccagaggtcgcccctagtcccatctccgttaacattcccatgtgagcaagaacctcgtgacgtcttctcaagtcttccgaaaggattggctgaccgacgtctatgatcggccaatagtaacctgagacccgacctggtccggctccagatcgtggccggctctgctaaagacactaaagctccagctaggatcgtcacgaaatcagaggatggacaaagcctcgtcctatcagtgtacgtcgtacaatacatcatgcgctcggtctacctggtctgacccttgttcgaaactcgtagatatcccaaagcactcaacccgagccaactcaattttctggcaggggttctcacgcgccagcagcagcaaggccggaaaccagcaggctctccggcagcagcttcgtccccagcaacatcagcatcgtcacccaagacggtcgacacatcatagcctccgtcgtctcgaacgtcattatgagtgcgatcaggcgtaagacgttctcgcttcattacctgtcattagtcatcgagatccatccatcgtactcaggtattgggccacttttgtcatcataattgcatacggaccgacggtcatgggtcccgcaggaattgtcatatacatatacattgcgaatcgcatatctaacgtcaagtctactatagtttatcgttcagtattcatgatcaggtcatatcgggcgatcgcccatcatgggatctcgctgtcggtttcgtcgtctcgttatgaagatttctgcgcctcccaaataaagtcgacgacaattccaaacgttccatcgtgttcgcgggcagccatttccatgaattgagactcgtctatgattgtctccgcatcctcaaatctcagagaagcgatactgagctgagcgcgcatagataccagttgtcggcgcaggtcacgatgactcttgcagaaagcggtgagccaatcctgaggatctcccgcctcggcgcgcgcgactgccttgatcagcaaccgcttgcgctcatccgcccagcgtaatgccttctgagaacgggcgaacacgaccatggcagtcgagagactctcgcaggcgtagttgaagatcgcatgcctcatgagaggtctcatccgcatctgatcaagtcggcgaaacatctccttgtcgaccttgagaagatgcctcgtgcgatatttcaagtcccgaatccgtcgatgccagcgcatgatacatctacggacgacaggcccgaccttgatcttgggtcctcccttttgcatatttgcaatgcgtttagagagaaccgccagatcatccgagagagggccgttgttggcggtcaagatcgtatcgccgatttccaaatacgatcctcgaagctgggcatctccaatcaatttctgccagattgtaaagctcatgagcgtcgacgggttaccgatgaccttgcaggcgaacctcgctctcgtcagtgcgacattgagacgacgagcgtcctctgtcagagaaactgctatcagtatctatctgcggaagactgaaacgatagggcgatactcactgacgaaccccaattgccgcccattattggctcgagtcgttgcaaaaatgatgatatcacgttcttgaccctgaaatgcgtcgactgaagcgacatcaatgacgatggagcacctcgaagtgacaacgatcctgactttttcgatacgagatgcggtctcgatcgcggtcgagccaggtaagcgggcgagattcttcacgatcagatgtacctgggcggtataaccggtgatgcatcccacctccacctctcccttgtgatcggttctaatcaaggtcgtcaacagacgctgtaagaacgacagcacgacgtttgcctcttccttgttgcagtaactctttgtgcgcaaattcttctcctcgactcccttgatcgcgatgaatgagtatggggcaaaaagctcttccccgttgatttgccacgaaggagtacgtcccgacatgatgacgttgatgccgtcctcgagatgtccgtcgtagtacgtgttcgcaggtcattgcgaaatgtcaggatgcattcgatattgcgtgcctaataacacgtatggcgagccggcgttcaataacctctcgaaaagggatattgagtaacccttggcctccagatcgcgattcgataccacacccgggagttgttgcggatctccgattgccacgagcccgacgatctcgggtctcaaaaggattgacatttcaggctccaagcactgtgtagctgtgttatctcccttcagtcaacgcatgcctagcctccggggattctacacctagacgtaccttcgtcgaggatgattaaacgtggtcgaccagcatacatgtcctggctcctccctcctgcagaattgacggtactgaagtagactctggttgacgccacgaaagcttcctctagtacctctgggtcattcgaaatgagcatatccacgtcgttgagcaaggtctcaagtttctccagcacatcgccgagagtgggaagcttgttcccgatgacggcgttcaggtcgtgtttccactttttcaagaggtccaggcagggtaaaaggttcttccggccgtcgacatccttgtcattgtaatcgcagctgaggatcgtcaagacgtcgatcccctcgtccgcgagctcttgatgacgaaagaatagaccagtgtcccattccgatggtacgctcgtgaccttctcctgcctagctttgagtagacgagacttgaaatcgtccaggcgttgggacaccttttcacctcgagcgactcgagaattgaagtagatggcctcgatcccgtccgatagatcgatcttttgttcggtaccgaagagcagtatctctgaggtgtgcagaatttgcgtgtgggcagcatctcgaagcagtctgacagcgacctctcgcatagcagcgttgctcggggcgacgacgtgtacgagtcgatcaggcttggccaaaataatcgcgaggatcatgctggacagcgtatgcgtcttgccggtaccgggtggaccttggatgaggatcgggtatcgaacgtcgccaagtaaaggctgcataccgctcaagacggcaagcttttgagacgggttgagcggtttgctcctcctgtgggtttgatgagcgatcgaggcggtcggttagtatcaatggtatgcctatcgctccgccttcaagcctatacagcacttacgagacgagatcggtgatgattttgtcgtgagtttccgactccatcgcggtgtctgcacccttgacgggagcgggagcgaggatatgcttcatgagcattcgcgagtggtcggggttgcagagggcagcgtagatcctgagttcggatgcgatcgaggaaacgacaacgataaggagacttcgagcctcgatggcgtccttgatcttttcgagatattcttccttgatggcaacctgaactttgccgtcggttttgccaatgctctaaacgataccgggatatgagaattgttcttcgtcatccgcagcgacctcccagggcttcggagtagtggtgaggtagacaaaatcgctcggacgaatgaacgagttcaagagaagagtcagtgcaatgacgcagcaggtgtcactggagcgatatttcttcttcttgccggcgtgcataactttggtgcaccccatcggtctgtccgccttttccggataggccaggatggtactcaagctggaatgcatctcggcgagcacgacaacaccgtaggtgttcatataatcactttccgaggtggtacacggaagacgaggtagccccttgatctcagattgatagtagcgctcattgcggaggatgtcaggggtccagctgaggagcgatgtagagatgttgagagcccgcatggtgccgtagtcgtcctcgttttctgggacggtcctccaggcaagaccgagggaatctttagcaaagtcctcgcgaagggatctggctgatgtcgtgaataggcagagccggaatgcgtcaaatcagcgaaacgaagttttgaatcgaaatatttatgttttgttgaccgggcggatgtcgaatcatgtcaaccgggtactcacgtttccacaaatcaatctcatgcggcggctgatctctccatccccttcttgtttcattgccgccctcgtggatagatccaccctgaccctcaggcgatccacagaacgaccgtgcactttggctgaagcgccgagagggtcctttgatgatggtcgtcgctcagcaacaggtcccgtcgtcaacatggtcgtcaaatcgacgcgccggctagaacaagtcgccaacggcttcgaaaccttcttcttgctcttggtgggtactcggaccccattttcaacttctcggaatccatggctactccacgagctttccatttcgatgacggcggtacagtagtggaacaggtggaagcctgaagaccaaatatcatgtcattcctctgctggcttaagagaaaatcgtgcgagctccggagaagtatgggacatgcgactcaagaccgcaatagtggcagacggttatgtcccttgatcacgacgttaaagatccagggccagatctgatcctcggccatgaccgactgagcctaacatttcgagctctttacatcgtgagatttagcctgacattggatgtttcgaactgaggttactcgcgcgctcaacttttacgccgtctgctcgacgatcctggctgtctcgtttcatcgcgttgcatgcactttgtaagctctttgtatctacaaacgaggacgacatcagcacgtaatcatagggacgaaagcccgcaagactgaagaaatgaggttgactgaaacacagtacgtcagatgattgacgaaagccattaaaccaacctcccatactgcagcgttcaccggcacaatctcggtattccttgaccaacgagccctggacggataggaagtacaagaccggggggggacctaaaccgggacttgcgagtcaggaggattaaagacgcacgtatgattggctatgacgatgtgacaccctgactgacactgcgtgggctatggcatacacgcgtaaaatcgtatatgaccttcgggactcttcgatgtactacacgtcccgtgatacagccacgcgctcgtgtatggcggtggtataacccaatgtgctagtcctgatggccgagacctcgattctgaaatggttgacttgaggcaactccgatcgctaggctccacgttcaacgcctttcttcttgtggaacgcattgataatgggcttgtattctcgatcgaaatcgttgaccccgttagatctgtgactgtatagctatttgaggagagtactaatggatttcaaaaagtcaagaatcaagtcctcgaatgagtctgattctgattgaactgcgtttctggcggacaagtccggctagcctgacatttgaagggctctgctcagcctgacattcaatcgagtcaaggttcactttgtaaataacgttacgtctaggcaggtgcatgctgatctcgatccagggctctgctttctgcttaacgtcttggcaagggtgcagcccaatcgccatctattgagatatcccagcgctttcatcgcctgttgacttgggcacttgtcgcttagtacaacttctagttggtacgatgggctcgaacgtcgaggcgtcatcatcgcgaactcgcctcctgggcgagactcggcccgaggaggtgccggtatcggcaactcagaagaagcagaatgactttaggaggtatctcgccggtcagagtgtgatgaagagcggtatgtaaactgtttgatcgatatcggaatatacgcatcgacttgaagttgtgcgtttcacgtcgataggcttgacaagagacccgcaaggtgcggcttgagctgttctgatgactgaatttgtctagtcaacccgactaatccgttctattccacagaggtggaagctatcatagcggaagcgagcaagaattccaagttctatctccgtgaagtggagaaggaccgggcgctagggaagaagattgaccagttgctgaagctggtgagtagtgcccctatcgaggtcgcgcaagggagtagagacccgcagatcctgaaacggacctcaccagaaagaccagatggtcaagaatgcaaacatgtctcggttagaaaaggaagccaacgaagcggtaagcctaacaacgccagaggacactttcattgccgaacactcagctaacgtgatcccctcatctagctggcacaactggaatcaactcgcgaccttacccaacgaattgtccacgttgacatggatgcattcgtaggttcctcaggataatccacctccggcgatgacgctgacgtatcaacctatcattccgctcacagtacgcaaatgttgaggtcaagaaggatcctagtctcaaggggaaagcgttcggtgtggggtcaggtgtcctgacaactgcttctgtcagtgctggtctgatcggtcgttgtctggcctcgaatgtgtggctgatcatatactcgcatgatcatattcagtatgaagcgagaaaattcggatgtcgatcagggatggcaggttttgttgcaaagaggctctgcccacacatcatcttgtcagtaccttacggcgttagcgttcggaaacgtctcgctaatatgcttttcgtgcgatagtgtcaaacctgactttgctgcatatagcgaggcctcaaaagcggttcgagagatcttgctagaagtgagctatgatgaggggcaatccatgaatgcatcttccttgtgctaagctaattgctcgattgcagtatgacgacaacatgtcgatggcgggaatggatgaaggatacctgaagtgagacgcacgcgtgatactcgcttgaagactctttctgacgcctggcatcgccagtattacgccatacatggcggctcatgagatgtcggcagcagaggtcgtctctcacctgcgagcggaagttgaagctcgtacgggcttgaccatctctgctggaatcgctccaaataccatgctagccaagatttgctcggacaagaacaagccgaatggccaattcgagttggctttcgagggcaaagctatcagagatttcatgagggatttgccggtccgaaggattccaggaattgggcgagttgcggaacgatacgcccaggctcttggcgtgaacgtctgcggggacgcgtacacgtatcgaggggtcataaaattgatggaccgatatatcggatttcaatacatgatgtgagtgcgccagggctcgaagactcgtattcaatgctgattgttccgcgcgatgcaggcgggcgtatctgggattaggcaacaacgtgattgagccgggtaaacgggaggacaggaagagcgtgggttgtgaaaggtaattggacaactcttcatgtctttcgattgctcctcgctcactgctccgttgtgatagaacatttcgggaaaagagcaattcggatgagattttagaaatccttcgcgagatcgcaaataaccttgaagaagatctgaaaaggaccggttatgctggaagaactgtcgtcgtcaagtacaaagtgagtgttcagtcatgcttgatatcgatcatgaccagatactgaagacagctctccctaccagctacacacctacgaaagtaaggatgccgcccgaagaatcgctttttgtcaacggtttagctgattctttgccgcagtctttactcgccaatgcggagccccgagattcatcgataaggctgaagatattttgcccgtaagcgaaacgatatagcacttgaaatacaactcctgctcaccctaatcgatcgtgatcaatagctagctcggtcgctcttgttaaaagaactaccattgaaaatccgtttgctcggaatccggatgacacacctgaaagatctgcgcgcagacgaaaagggcatccaaaaggtatgtcgtttacacgtctgtaagtcagcagtacgctttgactgaatccatcaacagtatttcaaggactcccaatcgaaggacggcaacgtcaaagacgcacccaaagaaggcaagaagagggatgacgatgagcccatctggctcgattcggacgaagacgacaatgaaagcgacgatgttgagcttgaaccagcggctggcaaccaagagctgaacctcgatcgcaaacgcaaacgacccgaacctgatattaccatgattgacgacgacagtgacgacgaaattgagatgctctgccctgtctgtggaacggcattctccagcgcgaacaccacgaaactgaacacccacatcaatgactgtctggatatgcaagcaacaacgacgacaacgatgacgacgacgacgacaacggaacaggtcattaaacccgctacaaggccttcaggcaagaccacctcgagcattccaacgaaaaagaacaagcccggtaccgcaaagaagcccaaagatgtgtttgagatgcttatgaagggacgacaataatgaacgaaactagatacaacaaaatctccaactttatgacccacccggaaagccttatatcaaattgtatcatctactttccgcaatctgccacgaactgttgtgctatcgccgcatgatcaaatcatgtcgattccgagtctcgcttccacagctcatcaatccctggaagactcatgttccgacatcgtcctgcgctgggacagacgattcggacgtaacggtgtcggaacgaacctgagtccgtatcgcgctaagcctgatgctgtttccaacgcaagccccgtcgcccaaccgaggctggtcgttcgcttgcgatgtgaaacagcggttctaggtggagtggcagctcgtgggacagaccgcctgtcctcatgctgagggagccgggccggcttggcgtcagtggatgcgattgtgatggccgaaggaacgcccatgtcgtcccaagagaagttgatcgcgagtctaggtcgcaggactctcggcagcgacgatttgtcgaagcgcggcaacggaaatccgatgggaggcgtttcgggggcagatgcccgactaccgaattgttccatctcaggagaaggcgactctctccgatcgctcagcccggtagcggtagatactgacttgacgacatttttggccgggaagtccaattctgacgaattctggagttccgcggcgagtgctcggccgggtttgacaacaggacttctgctgctggcttcatgtaagcgggcgacactctccccgctctccgttgcttgagaagagatcgattgagagctcgggaaagctacctgaaagcggtcgaaacggggtgcagcgatgacgagcgaggaacagaatgggtcgagcgcatcgtcaacggcgggacttgttggctttgaaacgacgggacctgattctgggagaggcttggttcgaccgttgaactcgggcatctcccagataggcggtgcgaggcgtatcggtgcagatcggaggggtgttgtatcacaagctgacaatgtcggtccttggtgttccagaactgccatcatattcgcaagcgagggctgccccgtaacaaagccttcctcgctcgtaaccgatcgcgggtcattcagcgagagtgaatcggtgatatcctctcggctagcctgtgtacgaagactacggttgccaggagtgttgcatagcctacttgatgctcgactgaggctgatgattcccggatgggattcttgcgacgagctcgagggtcggcggagtcgaatcggtgtgtaaggcgatccgggccgcttcgtgggtgatgaaggttggcttgtttgtttgtcgatatcggaggggtaacgaggagcgggagtataggatagataatctttagcacgatccaagctgacgggaggccctggagatgtcgtagtgactgcgatgtagctgttttcgggcgaagacgatcagtttagtatgtcagcattcgcgtggcgtgcctcggcttttgccccgactgactttgtcatgtttccgactgaacttgcccaaactccagctggtcccgaagcaatgtaagatgacctcgtagccaggactggagtagcaggcccagtgcataagctggaagcctctggctgttgggtcgaggcaggcatggctaatcagtccttcgttcgaggcagcaggaacagccgtctagttgagaccgttaggcaatcagaatgcgaggtacctccgactgcgaactatcttgatttccgtatcgtaacgagctgacgctcggagaatgttaaccaacgggtccttgttgagtccgatagcacgttcaccattacccttgctgattgctgacgacaaacatcacaaaggatatgggccactttcggaagtagatcctatgacgaagcatccgaataacatccggtcggaagcaatattcatttcaccttagtggtatctcaggcaagataacacgcaactttcacaaggtatgctttgagtgcaacccgctgcaacactgcccctagtcgcccgaagctttgctgggcaaacacttgtcatcagagacctcaaggttgccctagaaagtgtcagaaggacaccccgcctctttggccctgtcgtacttggcgtttccaacagcccaataggtaccacaaattctctacaccaagtggaatggcaggtttccgctcacctgggtggccgatctttgttggcgattgagagcaagatcaatgactgaccagactttgagaagcctaacgttcaggctctgattccaagctatcctgataccatcctcggcgtgtttctcgaccggcccaatctgatagttaaacgattcacggacaagaggcataggcgcccccgcttgagccggtgctcctacatcgctatcgtccgtcagaaggggggtcgctaacaaaatcgtgtatcaaagacaatggtatttcttctgtcttctacaaggaaagaaattgacctataattcctgcatttcgatcgtctctttccgtctcaaagtctttgttcgattccccccgtctgccgcgtccgagttgatgtctcctctcgagcgccgcggctccggattctcgttcaaaagctcgcgcagcttttccaacacgaacttttggaattcctcgaaaaaggctcgtccagtgcggataagtggcgtcatcatgcccaattggtacaagaggtaactgtcgattgcaagcgaaagtttcagctcacatctcgccggacaaaatgttcaagcagacgagcttacactccggcacccaagatggccactacgacgatctgaaggggattgaaaaggatgcctttcaggtcgttcctgcccaacacgaccaacaacccgtagacccaagtagggatctgggacatggtcgagacgacacttcgcttggcttcgacatagtaggcatcggcgtccttcttaaatctattctccagctccagcttcttggtctcagacaagatctgcagcgacgattcaaagtcgaattcggcatcgggatcggaggggttgaggtctgccggtagactgaactctgcttcaggatcgcggatcgtgattttcgaaaacagagggatcaagtccagcgtctgtttgtaggataatttggtcagcttgacagtttgctgtgttctgaactctgccactcgcctcttctttggctctcctgaactctccatcgatatcatcgttcggggtccaaactcgtggtgtgcccgaagcatcgtatcggaaactgtcctcgaactgatcccgcagcttggccataatggcgtgatccgacagctgttccatgattttggcgtgcagcgctgtccaagctcgtcttcgcagtacctgaatggcggcgtcgttctcttcctcggtacagttgtaggctgcgagtttgtgcaattcgctgtcagcctgcgacttggtccccctgacttggctagactaactcttagcgcgagtcatgtacatcttctcggctttggcaagcactgccttgaatgtgatcaaaaggttgtcccacatctggtcggaaggcttggacagggatacctcgaccggttctcccagctgcttcttgacagttctctgatgacacgaaaagagttgacttgagctggagtatatccactttgagatccttgctggcttacctcgatcgagttgaccatcttcttggtctcgtctgatcggcactgatcggcgatggctttcaagtcgcgtcgcagtgacgacagctcgtccttgtgggtccagttcacttctttgatttgcatctctgtcgtgatttctgaactcagtgctgtcagcggagagcagcaacgatcgacccttaccttcagcgccagcgacaaaggcattctccgcttttgccctgcactccttgtctgccatcgcaaagtcgctaccctcctttttcaaagccgcctcgaggtcgttcttgaaagcggcctgctgcttttgatgcaggttcttgagctgacccaagtacatcggcatcaacgacacctcgatagccttggcgacctcggcgcgcttgcgggtgtacacggcggggtggtatcgcgaagcgtccttgtcgaatttgcctacggggcgacgaaccatgtcagtgctgtacgttggtgaaacacgactcgcgatcttggctcactcatcgcggtggctctccaatcgcccatcattccacccagaccttcgagtaccgatcccgtctcaactggctttcgcacccctttggaggcagcttcaaattgctcgaatacgacagcagcgatctcgtcacatcggaactgggccagcagttcttgctgggtgggtaagtccaaatctttgtttgtcaagacttgttgctgcgagttgataagaaaggaccgtcaatacatcgacgaacatcaaccggaatatcagagaacactaacccaaatgccatccagataaaacccgactccgtcggctggaatccgcttgtgataagcgggcttgaagacgaaatcgtccctctcgcgatcggtaaacctctttctcaggtcgacaaccgcctcttcaaacttttccggcatcagcaccttgtgcggcagagcggcgaaagtaaggtcaaagtagtcgcccagcttggacgatttgaggtgttcaggctggaaaatgaggtcatccgtgagacattcaacgccgggttgaccacaggagaccatacgacgcactttggacaagccatcccagattttctccatatcttgagtcagggtctgggtcaagttggccaagggtgtcgaaccgacaaagtcgcggatgacaaacatcaacaacgtcttttcgtgcctgtcccgtccaatcgcaatactagcaatgagcttcgatcaaggtgcttccgcaaggtaacactcaccctttggcgcggatggcaccatctccctgcctgtccttcccaggtgcagatcctccgaacaagccgaggttgacctcaaacacggtcttcagcaagcccatattcgcaccctgatacaacccgatctgatgctccctgaccaaatcgtcccatcatcagctcgtcctgttctgacactacctcagagaacacggaatcgccagataacgggactcaccacaggttgacgagcagaacttcggttcccgccagactgaacaatgcgctctttcgctcgaaatcctgatcttccccacgttcacgtccgtccgtaccttcgacatccatgacgatggtaggcgagtagatggagggcgatagccagatccctgtcgacgatcaaaggtggatcaggtggatgtaacggaatgagaaggggaggggagctggacgggcgaacctttggtagtctgttgacgcctggtctcgtccatcacatcgaaattagtaccgaacagcctgttcaacagggtacctgatgtgggtcactggtcagatcgaccctgaaatgtattggcagaggtgtgtcactgactctttccggtactttgggaaccaaagacggcgacgacgtcgtaggcgaagcccttgtccagtaagccccatttgcccatatatctcgacaaattcggactgtcgagatgaagcgctgatggatcagattacgggcttatgtagatctcgagctggtcagacatacctaaactcctgcttctcgttgacgacctgcaaccgtccttctcccaattcgctagtgccctccctctgcttggtctctggtcggaacccttccgctttcatcgcgtcaatagcttctttgggtactcgagagtcgttgaggatctctttcagctcgcccgtggggttcttgagcgcttcctgagcggcgtcgatggagaggttcatccgggtgggataggtcgatgaaagggaaagcttggtatgtagtagccgtggcgaatgacgttgacgtgctgaacgctcagctatgtgacgtctaatatctcagaaagatcttgttccactgcaagattaaccctgatttgttgtttgtcacttggggtaaaactaggtatcggaatgtcagatgatgatatataccttattcgaggttgttgacgaccactctacatgttcgtctcgccctttacggcatgcatcgctcgggaattcgggaaatgatgacgtgcatcgcgggtcgaggatcaacttcatgttcgcaccgttcaaaagtcaacgaccaacgtcaatcaaggtcatctcgagttttcaaaaagtcgcaaaaccccggcactcgctcaaggaatctcggggatcagcctccaagcggtcttcttaccaaaatgttcctcatcccctcgcacatccgaaaagtgctacaatcggtcctcaccgaaaatgcccacgaaggggcacataccgctctcctcctcctcgctcacggtcaagtgctttgcacggcgagcaacgcggactcggattggtactcttccactgatggaggaaatgacgaggatggcgattcggacgaagatgacgaggaaggagctgatgaaagcgatgaagggaatcaagggggaggtgacgacgatgagggggatgagccgtacatcccgacgccggagaggaaccgaatgttgagagggatcgtcaagagccagttactggagacggatgcctttcccgaccgagccgcaccaggtgggaagaaggaacgagggagcatcaagatcgagtgtgatgtgagtcaaactcgaccggttctacatctccaaatcactttgttcgtaccatgtgctgaattctacccggactcccttcaatttgcagctcggacgactcctcctgcatccacttgcaatccccatccccataccctcatcgtccacggcttccagccccaaccagaacaactactcccaccccgatccccgcctgaaacacttgacgtccatccccaacctctctccccaatccttgacttacaccttgtctgctatcggtgtggaagagccggaagagctcgggcaggtcggtcagcaacaacagcaacagcagggagcagggaagagggaaggagtcgtcgtcctcgtcctgaacgggatcaaggacgtccagtgggacgtgctcgaacgggcggtgagtgacatgtccgagcggaagatccctggccgaagatcgatgactgacccgtattccctgatgtctcggaaataacaggccaaagcgttcgaacaggattttcgaactaagacgaagtagtcacctctcactgactgcaggaatcggttcccggtgcgacgtggagtgaatcacgcactctagatgacctagaccgggtatcaagcggggacggtgacatcatgaatctggacgatatagatgtggacgggtaacagaacacaaaggttgtatataagagctcatcatgcgggtttatcgaaagcggggtggatctacaggccaccgtttgagtgttgatgccgttctcagagcctcgcggcgcgagtcgagacttgtcaaatctcgacaatcaatgtccaacgtctagggccatgtaaaccatcggcccggacctgaaggcttcaagaaacaaagcaggactacacggttacatcgatttgcttgtctgaccaatgctcatatggacaaacaaggggttcttgacttgtaaattgattgtccaggtcaaaatgcggcggttgttgccactttcagcgattacgtaatcttcagccttccatttccgtgtcacgtgatcctttccaaccggttctcgccgctcaaaagtcatcgccccaccccacatccacctcgagccattcaaggttagacctcgtcgaaagtacagtcagacgacatctacttattataggaaatcctcttgcttcatccgacctcgttggaacaccacataccctgacggacgatacaaagcagacacaacacataagccacaatggtcagccttcggtttgcatgtcgccgactcataccggaatagtgactgataacgatcccctctgctatgctctaaactcaatagccccaggtaagccgtgttctcagcagatttagtgttgttgcgtatttgggtagcttacagacggtgtctacttgtgtagaacgagtacatggaagagcacaggaagcggtatggtaggaggctcgatcacgaggagcgaacgtgagtgtttcgcgctgttcaaggatgatactgcccagatcacatcgctgatctgatggcctaatccttgtaaacctttctactcacaggcgtaaacgtgccgcccgtgaatcccacaagaactctgccgtcgctcagaaactctacggtatcaaggcaaagcttcaccatgccaaacgacacgccgagaaggtccagctcaaaaagaccctcaaggctcacgacgagcgcaacgtcaagcagtcggacgattccgctgctacccagggtgctctccctacctatctgttggaccgagagggtcagaaggatgccaaggctctttcgagcagtatcaaggagaggcgaaaggacaaggcggccaagtacagcgtgcctttgcccaaagtcaggggaatcgccgaagaggaaatgttcaaggtcatcaagacgggttcgaagaagtcgaagtcgtggaagcgtatggtcaacaaggccacctttgtgggagagggattcacccgaaagcccgtgaagatggaaaggttcatcaggcccatggctttgcgatacaaaaaggccaacgtgacccatcgtaagtaccgcgccggactacttaatcgggctctctcgctaacgatatcaccatccctcttcatctgcagccgacctcaaggcgaccttccagttgcccatcatcggagtcaagaagaaccctcagtctcccctttacactcagttgggtgtcatgaccaagggtaccatcgtcgaggtcaacgtcagcgagttgggtatggttaccaccggaggaaaggtcgtctgggccagtgagtgggcggttcggttggtcgtcctatgtccagataaggtcgctgacgggatatcctctccttgatctccagagtacgctcagatcaccaacaacccagagctcgacggatgcatcaacgctgtcttgcgtaagtcgcttcacttcatctgctcgatcctcattattagctaaaactcacctcatgaaccttatagttgtttaatcttggttatgacctctgcccttcgtcctcacgttttgtatgtaattattgttgtatcattagcacgggctttttactccgggttcttggcggctgccgaccggtttcacatgctagattatatacatctcagcatgccaatcgtttgagccgttgctactatacaagcagtgctgagatctcgtgatcgagatatcttttacaatgcaatcgtgtgataattaggaaagaccatctcgtcgacgagggtcttgcgcacgagcgtcaatatgaagttttccaccttgccgacattcctgagggcatgcacgtcggcctgtccgatctcgctttcgatttgaagcgatggcaagagtcgtgttccaatcggtttgctttggtcgccggcgaacgacctcggttcgtagcggtcttggaacccgtgtggccctgatcgagcgttgagtcccggacccggtgtcgaggggtatgaggagtctggggacatgtattgcgagacggagtgggcgtaagagagggaaggagaaggggtcgaagcgtcggcctcgtcaacgatgcagaggtgtaatcgccgtttcggtccattgaacgcgaggacgacatcggccgacaaggcgaaccctgttatccgcagtttgagagggagcgtcatgaacattggcgaggggtaattgatctgcaaggtcgtgttcatggtgatgcacatattgggacgatgatcgatgtgtaccatgaactgcagcgagggcaagggttgtggttctggtggttcgatcggtacctcttgaggcgtgtaattgacggtcaaaggcggtgtgtgagaagcagaccgaccgcgctcttcatgggggtgtcggtgatgtcggttaccctggcctggccggtatgctccgttcttccttgggcccctctgagattgtgcccgggaatgcgagtagagcgaggcgttgaaaggtgatgctcctccgtgacccattagaccggcagcgagattgatacccatccctgctccgatcccgattccagctcctcccatcccagtcattgcggcacggggtgataacatcccgctcaagacgctggttgtctcgtcatcctgatcccatcggtcttcgaacccgtcgtaagagtcggcgagcggtccgtcgggaccggtcgtgtgaggtatggggtactgatccgcatgctcatcctctgactccgcatcgttctcctcgaaaaccttccagacgtcgccaatatccctgatctcgacgtctggtccgaccgtaccgaacgtgaactcggtgacatgaattgggcccaggtaggatggtctcgaggcgctgtcgagctgcttattgagagcgacgagtagcctgtctgcaagggtctcgccgctcgtggcgattgacaacaagctccagtcgatctctacagacatttgcggatctgtatcggcatctcgtcgtgatacgagaaggcggaatgcggtttcttgggtagatcaatggagctcacggagggtctatgtgaggaagaaaggttgaaggaaactggtctattcatctagttttgcttgagccgagctctcctcgcgagacttcctcgggccgtcgagcgagatcgcgccgaggggcacagttgcagacgggaatcttattcgacgtacacatgtcatgttacacaatcatacattggaccgatcgacataaggattgtttctcttgccaacactggaccggcttagacttcttgcttggccctcgaagcttctggacatcacagcgtttaccggtggtgaacttccgatcaacaagtagcccccacctacgagtccgtggcgatgcagagatgtcgtcgaacctctctttcggagcgattgtcttctgcttgcagtggggactatatatgcagggaccgtttgggatgcagagacgagtagcggctcttcttcccgtagcgagtccaacctcctcaggccaggggtctcgatcgcgcttgatccatgctgcgagttggcatcgtgttcttcttgcgtctgcttgtatgtgagcaagaatactccgatgaaggtggtagcaacctttgtgttgaaggagaggaaattgtctcagtccaaagccttgtgatttgtacagagcaagatgaactcactccgaagagaaagttggcgaatctaggaaaagcgaacagcaatgctgtcagggtcgtcgatgccaaccaaaattgtttcgaaatactgaccggctcgccgtgagatccctgaattcttggtacagcacagctgatccgacgatagctagaggttatagatcagatgagccttcttgacggggcatccaagagaggtgcaaatcggacgcaccgcttatcgagaagaaaacgaactgtgtcgggatgacttcctgcagagtgaagaattttcagctgaagtcaccgaaagaaagactcgcacatcgtctactgactcggctctcgaacgtctgtaacgccttgttcaaatacttgatctggcatagactcgtcccaatcaacacggccaccaaacaccatgtgagtggaagcgtgaaagcttgaaagtagatgccagacagcaacgaggacaaagctttggtcgagagcactgtgaatcccccaaagagggagcagctgagagaaagacgattgggaagctgtcaatttcaggtcaatctgggccacaccctcgataactcacatcagcacatcgatgacaacgagcttgtttccatatcgagtgttatgggtcaataccaatagacccgttagaatgacaatgatagcgatgcagtatccgatgaaagggggttgtttaagggccgtcaccaaggcatcgggatcgaactgagcatgcgaatgatcagctaggccgtctcgggtgaatctcgaaccctctccggacccacctctcgatcttgctgtttcgcggataagaccacagtcacggccccgagagaggcaagcaccactccagctgcatcccgatagccgaacctctctccgagcatgaatggcgagatgaagcaattggcgatcaacgctacaaggaagagcggaagccatcagtgtcaaggtctgaagcctgaagatcatctgaaataccaaaagcctcaccgacggtaccgagaggagccacaactgaggcggcagccagaccatacgagataaaattggcagattctcctattgccatgagaagtagtccaagccaccaaagttttgaccgcaagtatgtctgcttctccgagcctttctccgtctcctcctcgtcctcttcccggatggtctgagtcgtatacgaccttccggacgatactctcgaagcaggcacgaggacagtgtgtttcttttgtatgttggagaacattccggcatccgttgaaggcgttgggggctccacctcgactcgcggaaggtattgcgcatgctgaatatcgctgtcatcgagccgaatcactccgttttgaggtggttgttcgtccaacggtgtggtcgtcctggatgactcggcatcctgatcgagcctagcatgcgcatacttttgaacgttcctgaatcatgttgcaatgaaacgtgagtccgatagcaaatgcaataaagcatttgattgtcagggagctcacaatgccaacgaaatcacgatattaccggcgaccgagacgatgacaccgacgtaggtcggcgggatcttcgtcattaaaatgatacgatccgctagcaggacgttccgcgaaatctctcagattgcagatgaaccctgcggctttataaccttcaggatgaacaaatgaggattcgaaggcactgatcgaccaaatcatatcgtttggataggcaaactgaagcaacgagcagatcggaaagttcggccatcgcttaaccgatcaactgcatccgagatctacacccgaccaggaatatcgatctgagatgattcttttcctatctgaattggcgttaccttgccgtactgctcgaaggcatcccggcatgcagtcgaacccgagatgacgatgaggccaaggcggtgctagtatagtatcttgcggttcgcacgcatagactttgaccagcgagaccgtggctctgctcagcggactttgtggtggccgggcactccaggacatatgatgactttgtcaattgtcgaagctcggcttgcgatacagtacagccaatggaagctgagaaatactattgcaattactgctttccttccctcatgctcctgatctttgcctgagccccctggaatgaagctggttgcataacaaggaggtaaaggtcagtaatcatgcagttgcggagcagccctcccctgaaggactcttacggtctttacgggtcgaagacaaagccgaccaatcagcgagcttgtcgtggtattgcataaacttcttgagttcgggagcttccaaggcctccttgaggtcgggtccggccgatttgttgggccaatcagcgatgttcttctcgatccaaaggagcatctgcgtctgtttcggtggaataggtatttaaagaactggtactgacacaacaaatcagctaacgaatgactcacgatcatgggacccatcatgatatctgcggtgttgtattccttcgagttcacatactcgtccggcaagtacttgtctgtaaaggtcttgagagctgaaatgaaatcatcaaactccttcttgtcctttccaccgtctgaccggacgtaggcaaaccaggcaccgaatacgggttcgtactgggatgcgacgaacgcggctctggcccgttgcaaaggttccttgtctttgatcggccaaaatcctcagcatatctccgtgtattgatagatcagcacgggaacgaaatactgaccagcgatttgagggaatacatcggccacaaagttaacgatcaatccggattcaggcagaatgaaggcgtcctgtgggggcttggaggggtcggcgtccttcggggcatcgtaccagatggcagggacctggaatcataccatgtgtattgttcaggtttctggagcagtccgcgagaaagaattaagtctgacctttgaagcagggttgaccttggggtaccattcgggtttgttctggagatcgatctcgacggtctcgtattcggctccagaggctgccagggcgattctcgctcgatgagcaaagggacaactgaatattcagcgaggtgaatggcgtagatgagtttcgggtctcgagaaattgttcacgatcagcttacacatcggcgctgtagaggatgatgcggggagccattttggaaagcttcttggactgtagtctagcgaaggatgtcagcatggtatgagcaggagagcattcgcgaaggactcgccttcgatggattgatggtagatttagctatcgatactgctgtaagtcgctatataagacgagctggttgtgaggagaaaaggagaacttcaaagagcaaagacagttccgatcgattgcttatgaatcgatcgactgcgtcatgaactatgcgtcaaccgcgcgaacgccgagggttcgggcatttctcacacgtcaagtttcacgtgaacattttgctcgccagatcatccggtcggtctcgacatcgttacaacgccgaatcttattaatggtcctgggtattcatgcgtccgttgatacgttcgcatcagcttgtatcctgcctggccagtcattgcccttgttctgcttccattcccaatctcgcaacctagactcgtcccaggtcttgtcctttccttcgctgtagtccgacgcagactgtaataggctattggaaccaaaggaagaacgctcctgtaattctgccgggagatattcctggatgcacaccttgcgtcaacacacctgcgtcagtgacgagcctaacggaatggctcacattgtgtacaggatgtttgaagtcgggattatagctatagtgtttcccgtaccctagtgtcttcatcagacttgtcggcgcgttcctgatttgaagtggaacgcctggtaagggcgtctcgttcgccaatgctacggcctacaaggcgatatggacgacatcagcatatcccacttgtgcatagtcggtcagacaaagactcactttcccgtatgcttcgtatgcccgggtagacttttgtgcttcacttagataggcaacgcaatgctgggaaatggaggaactgacttagtttcggttatatctctagcatctcgacacttcttctaccaaccgccaggttcagcctacattcaggcataccgatgacctggcatgcctggtggcaagccatagcctgatgcagtcaatatcgtcaaaggcaggtaaactcggcctaaggggagtcaagctcacaagaggcaaaccgtgaggatcacccaggccgacgtcttcgcttgcgaccacaatcaagcggcgcgcaatgtatagcgggtcttccccaccctccaacatgctacgcagtcctcgttagcatggctccaagaagaacagcagtctcttaactcaccgtgcaagccagtacaatgcggctgatccgtccgaccctcgtatcgatttgtgtaaggcgctaatcatatcgtagcgttcctctccggtacgatcgtatcccttcctcagaccccttttgattgcgctcatgagttccttatcctctgcctctgcctcagcatccgcttcggtcatgtgggattcaatcgaagtcctctgcgtacacacgctcaaggcgagttccagactgttcaatgcctggcgagcatcaccatcagacacttctgccaagaacgccagaagcgtagaaggtatccgaggtagaggcggagggtacgattccaatgcattcttcagaatttgctcgagttcgggcgatgtcaatttgttcaaggtgaagacactatggttttaacgatcttcttgctcagccctggttttagactagctagtccctaccgatgctcaccgacatcggctcaataaagctccattgactagaaattatcgatgatcatgaccttcaatgaccaaatctgccatctttagcacaagtcaaacttgcctttgaagctcggattctctgttgtcgcgccgatcagggtgaccgatccggtctctacgaacggtaaaaataaatcttgctgtggcttcgtgaagcgatgtatttcatctgtcatgtggatgtgttacaattcaatatcataatcatactttgggtgccatatttccggacaactcgtagtgtcgcaaatttcctatcaatatcagactcacctatgaacaagaccgtcctcctgccaagaagtttcaactgattcctcgcctgttcaaaaaccttccgcacatccgccgtccccgagcttgtcgcactaagttctcgaaagtcggcgtccgctcgattagcaatcaatcttgccatagtcgtctttccgcttccaggtggaccccaaaggatgatgctgccgaaagcagccgtcgacgacgattcagtttccagcatggaccgcaaaagactgccttgcccaacgagatcggactgtccgacgaaggttttgagcgaggatggacggactcgttccgctaggctggaagtggagagcaacggcggtatcagtctctgaggcgtgcgtctatcgctcggaaaaatgtataataacggttgggcttgcttgagcgggtccggtctggatttctttatggatcggtcatcatccagctcgtctgcaatccttcgcttctcttgtctactggtcgcaaaggaatcgtctgctacttcaggcttcggcttggtatctcgccttgcagcaggggagctacccagatgtttgccctttgaagagccatgttccggcttcgtgaacatgttgaacacgggagctaggccatcctccttcagactccgcttgtaagaatagtcctcagaaactttcaccggactgtccaggatctcgatcacatcatcatcttcttccgactccgctgccttgtcctgaggcatcttgttgactgctggagatgacctgacttcactgctgttttgacaagctccctgtccgttcgtttccagactttctcgtctcgccggtcctgaccaaggttcccctagctaacacatttcaatctgctaacagtccaagaggcgttttcacgagacctgtggaaaactgtcaaagctcaatgtagaagagtgaagatcatcgtctgcacctcgtagaccggtgacggaagggctcggcgatgtgccatttggttccggccagatatcaccggaagcaaccttacaataatgttgtgtcccaaagatttcaagcctaagcgctggcctactgatgtacagcctatggtcatctgcttgctgcttgcgaacctcgattcagagacaggtcaggatagcgcaacgatcatgatggtctgtcccttctatccgtagtgggtaggatgcaacgcaatcgcaatggaaatgggtatatgtggaaagttgatcgagtctccctttccgtttacagttgggctacataagagcatccgtatatagtcggcggggtttccatagcatgaagtggttgtcggatgagtgcgacatcgtggcatctaaatctccgcgatgacaccgacatgcagagtccttcgaaatggatagaacgatcgattcagcttgtttgcgccagtaggacaataaacatgctcgcccgcaaggggacttactcttccaaagactcaggcgagctgctttcgtccgggaacatgacgcggaagcgaccgtacaactcttcgatcaaaactcttcggatccagtctacaacaccattgggctgctttcggctcatcagtcgatagctggagttgctgcggtcggaaatgcatgattctgtcagcctgggacattcgtcctgattcggaggtggcctcttacatatgggtcacagttttggatgcctctgcaatgcgattcaagcgtttctggatatccatcggcgagaagttcacctcgatggtctcgatttggcgcagaatatgttcgatctcgggattgatccggtcgagatagccgcgtttcatggtcactccgtaaaatccatccagcgaacgagccttggttacttgataacgatcttccaactcgacgtgcggtcgggcgactgtccaggtcgaaaggaaaatctgggccaaaatgatctggcttagtctagctgtgagcgcttcgtctgttcaagacaaactcacaatgactcgaggtaaagcaggtacctggtgcaagaaagtcgagaatgcatgcggtacaccttgacctcccatcttcttgtagaagatggcggtggtagtggtcctcgccagctcgaacatagtcccatcgggctttttgatgtaaaagtccccgtgactgtcgcaagcgattcggtcccgctgctgcacggagtcattggagtgctccaagatcggcatttcttgctctggctcgtacactctgctcccggaaccctttgtttcgttctcagacttggtgtcagccattgtgatatcgttgaagaccacaaggttgagttttcgggaatgattcagatcgaatttgcgctccagttcctgttcaattgtgtacgagtatttgattagctgaaggctgaattagcattcggccctgatcagccggtcttacctgcccccacgtccagaagaccatgaatatgcagctaagaatcgagaatcaactgggaatcctggctcagtgtgcttcggaagatacgcacagtatgctacctaatgccaaggggaaccaggcaccttcgggcaccttcctcagggccgcaccccaaaagagagctgcacattaaacctcttttcagtcacgcagcgtaaaggctgtactcggtttgaaggcatttaccgtctaagaagccaaagaatatgaagaaaagcacgccgagactccagtgaaatcctttaacgagcggaatatgcaagctgatcaaggtggtagtgatgaacatgactgtcgcgaccgcaaacctgtccgcatagctttcagcatcgtggtagtctctgtcgtcagaaaaattattctgtagctcacccgtaagccagagtcaaagcgaatgaggacccaaatgctgccactgtcgcaaccgtccccaccatgagcagccaattgactgctggaacgtaaacttggccggctgtgatgatggaagtgtgattgatgcgaatcgaagggaagctttccatgcctatgagctggtttaccagggtaaaagtggcggtgatcatggctgcgcgaccgcgaaacgattagctttgtaaaatcagggacacgaccaagccatctgaccttgcgaagcgatcaactgagaaccgacgagaccgctttagcgcctgaataatgatcttccaatggattaaagccagctatacttacggtcgcaatcactcccatgatccaggtcgtccaccaaagtccaccatttggaccgcccggaatggacaggtaaaatggattggccataacggtatcgccatctgcgatcaaacgggcaccttggcccaggtactggaagatcaaagcgggatacaccaagcaaaggaatgagatccggatcgaggccgccgtaaactgccccaaattggcgctagtgacaaacactgcgatgagctgtcgacctttgggaggggatcccttcggggatgctcacaaaatcgcttcacagcccgtaagggcaagaagtacaccagccagcgcatcatagtttttggttctgacgaagactgtcaaatccccagatatgttgcgaagagacgaagaggtcgggaagtcgcaccgggtggttgcgttacatccaaggcttacacatcacggcgcgagacggatcaaaggcgcggagaatactgggctgagtcgtaacgttgatgatactgaatgaaaaggaatagttagctgaagaacatcctacccgaaatctgccaatggtacccacccagaaataccgatcaaagcaaaccacaggaaggtgactggagcaatagacatcttaagcaaaagtccctgctcaccctggggtacaaagcgaatgtactcacgaggtgcgaatattacgctgagttttgccgtgccgaaacgctgaccgcagaagagcgcgatcaagaagccaatactgatcgggatgacgtgatcggtgacgacgggcgcgacgactgccagtccaccgacggatgaagtgacggacacggccggggtgaggattccatccgccatagtcaaggccgtcgcgaagagagtctgtatcggcagttcaggtggagtaaatccgaccatcattagctcgtagcgcgatgtgataacgaaagcgtctgcttgcccaaatctgcaacggccaacgcaatttctgtaacctagacgtggtatagacagcgtgcttcccatttcccgccacctcgacgtgtcgggtgagttcccgatcgttgtttgggtccctgtctgggtcattatgcgggaagatctgttggaacagggcaaaaggtccaccctccccttctccggagccaaagctcagagcgaaaccgatctgtccggagggtcgagagacacccgtgtcagcgagatgattgacctgaaagataaaatcgctgaatgtgacatgggactgacgtatttgagaagaggcaagaggctaaaagcccagacgatcgcgctgatccctccgatcacgtcctccttgtcgggtgggggtccggtcgtgctccacaacgtcgtcaatacgtagagtggactcgtaccgatgtcagagtagataatcccgagcgaggaaaaggccatgaacaccaatcttctgcctccgagacgcagggcttgacggccctcggcatcgttgatgggtgaagacatcgtggaaaggtcaagttcgattcaggtcgcgcgcgatgtgaaactcgggaggctcgcttatagatcgatgctgagagggggaagtttcttgccgtccgtgatgcatcaacacgatgatgctcgctactgggacgaagggtcctttgagacaagtcagcttatatattctcggtggctggcccatgaagaacggcactcgtgtaaatgagcctgttgttccatttttttcactatctgccttgcatcccctgtcctcccagctcgatcaccccgggacattcaccggattcagctcgctctcttctcatgcttcctctaccccttgaaaagagacatttgcacacacgccttgcaacatgaacaacaagcactgtttcgatgagggtttttgctcgatttctctttggtggatgataatcgtccggtcagaatgggcgttgcggatgcacgttgctcccatatcgttaacgcgctgagggatatttgccagtggtacggggcgcgcgccatgtgacgattgtcaataaactctcgcaaggaaatgtcccaagataactccggaaaaggcggacgttccaccaaaaggggaaaagagcaggcttgcacagtggataggccaataccacggaagagcactcgaagaaaccgccgtcaaaccactgtcactcccgcaaaatgatggcgagcccagcagtatttcctttgacctgcccgtttgggcttgttctcgcgcgaaaaagtcgctaggtctgccagaccatgtttttttctttctttttcagtccgctgccctgttgagtgactcttctgcctgtttccagggtctccagactgtcactatgcaaccacccctcatacaaatcatacaaagaacgactaccctacggaaaagcagatacgagaccgagatgggcgattcgttgataggttcaatgacgtgtcaattccctaccatcttattatgtttgatactcgattaagcatcaacagttcgcttcgtctttccgcttacgtaatcagttcccgcgggtcttggttcgataatcagcagcaaccactgttcctctgttctgatcagaagtaatcagcaacagctcgtgcttatgggtcaaagctcctcatccccgcctttcctagtgtaacgagcaaacgcaattatgtctgcaagcaagtattccaatctgccggatgtggtgagttgcacagatgtgttccagctagctagctattcgaacaacaagctcattgttgacaatgtccgggaacgtcctacccatatcccttgtcttgctcatttgcacaggacacgtctgcagcagatatctacgaaactgaagatgtcgcttacacggcgggaaatagtgtgaggatgtcctgctttgcggttcgcaacgacgttcgaagctaaaccgatctacatcacgatgtcaacagcaagacgcctatgactccgataactcgttgtcgagattgaacatgctgtccgcgaccggtgcagagggaaggagcaggggcttcaaagcgggacaagccgaggatattgacggtagttcactaccccctagaagggaggctggcaaggcgttcgggaagaggagcaaaggacttgacgataaaggtgaattggctggcatcaacctctgatcatgacgctgacgggagaactcatcgctcaacaggctcagtctatacgttccgacccagaatgtcattcgcctatctcaggggtcaagagtcgaattccgactcgtcctcctcggaggacggccttgggacaagctcgacagctcaccgaacccgtcgatttcgggaagacccggccaataagcttcgtcggctaaaactcgaatgcctggaattacaaagacagctcgaactcgatccccagtctggggatgctcaggtcgaccagaaaatcgttgctgagcaggaaaaggacgatgaggcgggctctggttccgcggggaagaagactcgagtcaaaaagccggacacgcaggccctgttgtctcaactgctcgagcttcggacgggtctggacaggactgagcaatcttccgtacttcgtaccggagatactggactggataataagaagctcagagttagggaagaggctagcaagactttgatggacgggcttggggccagaccggcggtttcggaaaatgggaacggcggggcgagccaaacaatcaaagttggaccgagcacccaaggtcaagcaaaagatgtgcatgtcgttagtgaactggataagagattggattcgctagagaagcgcatcggagctggtattgacacagcttcagcggtaagctttcggcgtcactgtcagtccgcttcttttcgcatcctgacgccctgtcttggtcgcttcagcccataccgatcttgttctcgctgaaccgcatggattctatcctgacgttgttatcgcaacccgaccaactggacgacgtgtcaaaacgtgtcaagctggtcctgacggacctcgacaagacccgggcgacgccaaacagtaaggccgctatgccgtctgatcgggcagaaggcaagaataccgcagacctgaagctggacccaagcgatgcccagaaggtggacgccatttacaacgctcttccgaggatcgaaccgattgttcctctactccctcctctcttgactcgactccgcagtctcgcctctttgcatgccggtgcttcgtccgtccagtccacattgtcccgactcgaaggggacacggctagcatgaaggagacggatgccgaagtcaaagaggtcctggaccggctggacgaggggataaccaagcaagccgaggcgatgaagggaaattggaacagcttgagcgaacgactggagctgttaaatgagcgggtggctagattgcaatagacgatctcgaatcgagcgacatgaccttacgaccctttcacgatgtacaagcgcaatcatgttttctgttgcctatagcaatttgtgctatagttcaaagacgaggagagggcgggcaacacaaatggaagttcaaaggagttgctggccccgggtcttccaaaacctgtatagatccgaattgcagtcgtgtccgactgcccctcttgaggatgagatacaatttggacgtcaaggtttgactctgggtgctgacccacttgaacgggagtcgttgtgaacgaaaacgaaaagtagcagctgctgaagagttccatcgatgctgtatgctatcgtttgatatcggccaatcgggtccattcgggaggtggaggactcggcacacgacccgcatcaagactagcgttagggagcccaggaatgaatcacatgacatgtcatatggtagcaacatctagattaggtcgatcgacagcgatctcaaaaagggcccgatgtgtaaaatctgcctgaatctcttcgcacccctcgtctactttctcaacctgtatgagattttggccggcaaagggagcaccaccatggtctgcagatagatgtaaagcaaccagtatgaaatttggcgagatgcatcaagaggaacagcgcgagacttacctggtagttcgtcttggggaagggctcctcgagcttcatctccatgtttcggataaaggtcgcgaggatggtctgcaattggaggtaggcaaactggaggcgaacaaggacgtcgtgagcgccggttgactaatggaaaaagacgtccgacgtcgtcgacaactcacgctctctccgatacacctgtgtcgaccggcaccaaacggttggtacggcgattcggtacccttgctgacggaaccgtatccataatcaatcttgtcccctccatcgtactcggccaatgccttgctcgcgacacccttctcgtcgacccatcggtgagggttccagatggtcgcgtcttgccagaccaaggggtccatctgggcgacaccgggggaagcgaggacgaaatgtcccttgggaacgacgtacgaggcgttcttttcggggatggccggggcggcgacagaagtgggaacaggaatgtcggacatgaccttgcgcatgatcgagtgaatgggcgcgtgctacaggtagggcgtgtaacaatcgtcagcgttgatcgttcgaagccctgtctagcgatcgcgagagcttaccatcctgagagtctccctgatacatgaatcgagtaagggcaagtccttcaagtcctcgtaagccaggtccctaaaggtaccgtcggggtttccaaacttttgcttctgctcctggtaaagttcctcgctgcgatcacgcccgctgaggtgagcaagccagttccatctccgcccgcgacgtccacccccactcactaaacatcgggtcgatctgccaaatgcaagagggtccacgagctagtggccgaagacgtgtgttgaccggccatgaggagggcgatcatcatgtgagcaatgtcggaatcggaaagaggggtcccgtcacggtaagtcgagctcatcagggcggcgatcatgtcgtggtcgtgctgcgacggagacgagaaaagcgaattcggtgagccgacggccagactcgagatcgatccatcggcaactcacgtcggctccaccttcccttcgacccctgatgatctcctggtaaaactcgctcatctccctctgcgccttgtcccttcgcttgtagctggggaggggcaagttggggaacatgaagttgatcggggtgaacccgccatcgagggcttcgtatcgtctcgcaaacgtcttgtccaacttgttcctgacctctttaccctgcaaagtggccgatgccgtgaggatggtcaattcggccatgctgtggagcgcgtgggcgtgtttccattcgccgacgacgggcttgagttcgttgttcatgaaatcggtagcctcctttttgatgagggggacgtaggacctaaagttttcggtagagagtccgaatttgaccattcgcttttgctgcatcaacatctcgttgggacagtcgtagacgacgcccttgccaaagaccggggtggtcaagtgctatatcgcgcaaagaggtcgtccgtctcagccccgtgcgtaaagaaagccaaggaccgaacgatactcacggtatacgcgtcctctgcagagacctgactgagtttccctccgaggatcaagttgtttcccttgggaccgagcgcgaccgtcatcctccttcccaagaggataaaggtgaacagatcgccatactatcgaacgatgcccccgagttagcccgttaaccccaacctgccttgacccggccccggccctggcggtgtgacgcgagcgagggagatcgagacccaccttttcacgacaatcaaagaggaacgcataggggtccatcccgtacgtcgcggcgctgccgaaccaggggatgtagtggaagaccaaaggcggcaaggtcgggtcgcggggaagggcctgatgaacaagacgagacacgggacgagacgggacccacactgctatcagatttacgaggaaaaaggcagacgatccgggtcatccgtgaccccccgaggggtcgacttacgagttgcctaaagacgttgcccgctaccaacaacaggggcaagagcactaccagactcgcgatcaagacggcccatccgaccttttcccctgcccgcatcaagggctgtaggaccagggcatgcacgcgatcgagcgggagagcgccgatgatcttgctctgcccgatggtgtggacgacgtcggtgtacatccgcttgacgtgcgatttcaaggccgagagcgaggtggtggtctgggtgggcatgacgacgaggacgaacggggtcgatttcgggtcggccaggagctacggagagcgttcgagacgagacgagacgaggttagtggtcagatggacgtacccacccacgatgtgcgccgcagactgtgcgactcaccgactgtacgctagcccggatgaaactcaacccgacttgcctcaactcggcatcgacaccctcggcccgggcgggacccccggggacgtgtacgacggtgctctcccacacctcttcgttgtccgacttggtcgacgtcgaagggtggacgagctgggagagggcggcgagctgggcgtgcaaagtttgcgcaggacctgtagtggcagaattagagacggatgcgacagagggttatggtaggaaagagacggccttatcagcatttgtcgagtcgatatgaccacacaccggaaggactgacgggaatcgaccacgtccaacaaccccttgagtcccctctttccctgtgctccctcggtctcacccccgacgaccttgctttggacctcgttccagatcctatcgaaaccgtgttccaacccgtccctcgcaccgcctaggaaagcctggacggcgcgttcccctgcgacgaggtaaggctggaggaaatgcatcgtctggaacgaggggaacggagggaggtggaacgccggagtggagaggtcggatgcttgaggggtgagttgagggaggacgtccatggggaggagatcaccttggatgatgatgatcttggctcgatcgggggactggagggtaggtcggccgtgcggtttgatcaggtgggaccagatcccgccttgttcctcctctttggcgtcgttgttatcggcaccatcgaggctggaatgaccctgaccggcgagtccaaagtggtgggacaagaccagatgagcctgttccaccgtcaacgtgggtacatggtggtgaacgtcgttgtgatgagtctggggggaagggtaaaggtagaccgagacgggttgttgctgttgttgttgttgtctttgttgatgcgtgtcgtctgcctggacgttgatcgtgagagtggacaaggtggccacgagggcaaagaggggattaaacctcatcttctgcacaaggtgtgctgtggcgagtgtgtcggttgaacggtcgaatcgttgcgtctctctctctctcgtatgtctttgtatgacctggtagtggatgtgtctcgcccaatgatcattccttcaaaagatcgaaccacactactcgccccttcgcctcgcgtggtgcacagtgtgacggcatgggaggggcgacgtgtatcttttgatcaaatatcgtcggatacccaaagagaggcgttgaaccaaaggccaaagggtagcagtcacctctgcacctcgtacatccatgtcatcaatccgccaagatcatccgacaacaccatcgtcgtcggtcgtaccatggcatggtctctcccactcgaaaccctctctatcgttcgattcgtattccccgtcgactcgactcgacgccgtcaatgtacctcctctaatgtcgtcgtcgtgttcatctaggatcgagggttacctcagaccacgctcaatcttatttcatacatgtcacctcgcacttcgacgagtctgggaaacaatcatctgtccccccgtcgatatttcgatcgtgttattgggggaaggcggtttctcaggcgcgtgtttcccaaacgtcctgcatcggtctcctactagagttgctcctgtgctggcttgctactcttgatctaaccctcttcgagccagcgagcacagcgatgatacgtgctgaacaccgacctaccgacctgcgacctgacgggatcagagtccatttttcttgaagccggcgtccaatcggccttgctagccccgcgcgcgttatctctgcaaggtgcttcccattcgtcatcgcccaggcagagagaggcacatggcgcgtgggcgtgggcgtggcagggctgctcctccccctgcctgtgctcccccgccctgtcccgagacttgacgtctcaggataccgttcttttttgcgaatgtcgtttatctctcattttcttgcatgcacctcccccattctttacatcgcgctattgctagtgccagcgtgccatccccccgctctttccgactcgtctctgaccgacaaacttctaaatggtcggaccgagacctgacccctgtgtccgtgtcaaacatgggttatgacgagcttagactccctctgttcgatagcgagtcgaggcgggaataaggaaaaaaggaaaccgggctgatcagcaagacgttcctcctcgggatgaatgacgacagcgacagcgaagtcaactcctcccgctgctgctcctcgaccgactcacgtgcgagggcggcgttaaacttgttgacctttgagctcgcactgaggtcgatcgtctgttcgccgaaatcgacctcgagtccgcccaagatgcccgggttgacgcggttgacgagtttgaggtctttgccctgggcgatcttggtccccttgagtgccttttccaggcgtttcatctccgcacccccagcggccaagggttcggccgaggtgacggtgacgacgagttggccacggtgagcggccatgagggtggagaagtcggtaatgaccgaggggaaggtggagagtcggccgttggcggcgaggacttggaggaggttggtgatgatgggggaagaacccgaggcgagcgagtcgatgagcttggatcgctcggcgatcgacaaggtagggttggctacagagtcgggtcgggttggtgcatcggttcggttcgggttagcaaactcaacttcagaaaggacaatgtgcccggcgacctttgaatcccctggaccaaaagtcggcgaggactcactcaaagcgtcggccgtcttctggtcatccttcaactttttctcgatcgattgaagtccggaagcgacggattccaactccttttgcgactttttagcggccgcgaggtaggtcgaggtggcgtaagtccccgagagcgaagtgatctggacggggggctattggggtgcagggtcgggtagtatacatggtcgtatagcaaagagaagaacgtccagaggtgtcgacgaggtcagttctgggtgatgatacgatacgaggattcgaaccgtgcatttgtgtgtaggcgtgacgtaccttgacggcggaagcggtcgcgtatcccctggcgaggagagatcgagtgagggaagccatctttttggggtttatagggggatgtgtgagacgaggtttctagtgatgaggaagtgtcgggggggaggatgatgatgatggtcgaggttgtgtctctttgggaatctaatctgacaatgacctgctggggtgctggtcgctggtcggtcgttggctgtcccgcgtctgtctgtctcttcccgcgctcagcctctacctctcgcaacgttttctgagctagcaagctggtccctggctgagtttcttgctttctcacgcgttgtcaactttcaatctctctctagtgctccctcccccctctccccctcttccctgcctttgcttcgcgtcgctcgatcacaaaaagactttactctcggaagatagggtcaggtcgattcgaccaatacaccaacatcgtctcgtacaagccgactcttcacctagacagacggatccgtatagagatacctcgtacctcctctcttcccctcattcgtatttggacgaccaccccccaccccctccaaacaaccaaaaaaagagccacctttacaggctctacaagaaaatcagaggggaacgttaaaacctctttgaaccgtagtgacgaaacaacctcgtccatccatccacccaccaacacgacccgacccgacttgacccggcaaaaatgtccttctttagaggcggatccgactctgagtcgtccgacgaggaatccctccgatcgaccgacgacgagcagaagcagttgaaacccaaatccaagctcgccaagaacgctagcatgttcctcgccggtggtggttcagactcgagcgacgatgacgatagcagcgatgatgacgatagcgattcggatagcgatgatgatagcgatgatagcgatagcgatgacgatggtgacaaggcggtgaaaaaggtgcgcactcttgtgccgggaggaggaggctcacgcgagctgactacatccctcgtctggcccgaactcttcttccctctcattcctgtgatcgatctttgactacgaaccacgaccacgacgttccagggccgaggaggtgccgccgccttcttgcgaggtgccgtctcggacgacgaggatggctcggacgacgagcgcaaagtcgtcaagtctgccaaggacaagcggtgagtcacgctacaccgtctcctcttcaccgctcgaagtccattagccggacctcgagactgagactgacccgctggggctctttcgttcggtatggtacgacagattggaggagatggaggctaccgtcaaggtcatggacaacgcttccaagatcaacgattgggtcgccatcaacaacggcaagtcggattcgcttccccgaacaccgtccgaaggagaagaactgacctcgccgacgtcgtcctcgtttcgacgcccgctttccttttcggcgcctcgcctatagaattcgacaagctcacccgtttcgtcgcccgtcaccagaccctcacctcgaccttgcctcccgccgcccagaccccggcgttgtacatcaagtcgatcatcgacatggacgtccagatcaccgagacgaccaagagggaaaaggatagcaagaagaagatgaacgccgccaacgccaagggattgaacgggatgaagcaaaaggtcaagaagcaattgcgagagtttgaaaacgccgtcaacgcttacagggccgtgagtcggatcgcaggcgcagggttgtgtcgtggcccgtacagcactgacacgcatgccctccaccccccaccctttcccccgcgcggttctcccttttgtcggcttgatcctgcttaggaccccgaggcgttcgaggccgcatacgaggctgccgtcaccggatccggaagcgctgctgacaaggagaacaagcagcgtgcgagggaggccaggctggcacgcaaggctgccggcgaggaggatggcgaagagggtcaggagggtgacgatttcatgaccgtcggacgtggcggtcgggctttgcagttgaccagcgagggagtgttcaagacgttgaagagcatcgccgagaacaggggacgcaaggtgagcgagcgagcggccctgaacgcgaggagggcaagcagatcactcggacggaaactgacccgacccccgcgtgaccccaatgatgaccatgttatcaccagaacgtcgaccgtgccgagacgatcaagattctcacccggttgctcgaagtctcgaccacgccttaccaaaagatccgggtcttgctcgccaccatcgcttcgcgtctcgactactcggccagtctggcttcgatccctcacgactcgtgggtctcggccttgcacgagaccaaccagttgatcaccatgctcctcggcgagaacaaggagtacattgtcgccgaagagacggaagagtacgacgacatgatcgagcgcactccggcttccgagggcgtcaccgacggtcgcgtcaaggtccgaggcagcttgatcagctttatcgaaaacttggacaacgagtttaccaagacgttgcaaaactcggatcagcacggttccgaatacgtcgagaggctcagggaggagaggcccctgtacgagaccatcgtcaaggcccaggtcttgttcgaacgagagtcgtggagcgagcctaccgccagggccgtcatgaggcgtttggagcacgtttactccaaggtgagtagtcccccttcaactccaaactggcaaggtgtgacggggcttcatttggctgaccgtgtctcttctgcgcgacctcggtagccctcggccatcgtcgacattctcgagcgaagcgccgtctcgtcgttgaccggcgagtcgtcccaggtgaccgacatttcgacccctcagaacgccaacgatctcgtctacgccctcgccgtcaacctctaccgagacgccccggccctcatccgaacccgggccatgctgtgtcacatctaccacaacgccgccaacgggaaataccacgaggcccgtgacatgctcttgatgagccaactccaggcttcgatccagcacgccgacgtgaccacccagatcttgtacaaccgagtcgtcgtccagatcggtctcgccgcgttcaaaaagggtctcgtctccgagtgccagtcgaccttgctcgagatctttgcctcgcaacgcgccaaggagctcttggcccagggtacccagcgattctccaacaacactcccgagcaggagctcatcgaaaagaggcgattgttgcctttccacatgcacatcaacctcgaactcctcgagaccgcgttcctcgtatcgagcatgttgatcgagatccccttgctggcctcgctcgacacggatgagagcaagcgcaaggccgtcagcaggcctttcaggaggctgctcgagcaggccgacaggcaggcgttcatgggtcctcccgagagcgccagggatcatatcatgcaggccagcaaggccttgcagaacggccagtgggaaaaggccagggacctcatcttgtccatcaagatttggtcattgttggacaacgctgccgaggtcaaggagaagctttcccggtgagtattcacgtcgagatgtcgtcgagaccgcaggcgcgcttgcatcatttgctgacatgggtctctgtcgccgtcacagaaaaatccaggaagaaggactccgaacctaccttttcacctacgctccttactacgacagcatctcgctcgacctcctcgccaacactttcgccctaccccgaggtaccgttactgctatcgcgtccaagatgatctggtcggaagagctcgtcgcttcgctcgaccagattgatggcgtcgtcgtcttccaccgagtcgagcagaacagggtgcaacagctcgcacaggaattggcttccaaggtatgtttgtgcgacgccaacatacgatcgatactccagctcactgacacgaggctcgcactcttacaggccgaacaattgcttgaacaaaacgagcgagttctcgaccagaaattgggaaccaacgacaaccgaccagacggcgagcgaggtgctcgacagggagatggcggtcgagggcgaaatgagcgaagaggacgaggtatgtcgaccgcgcgaaggccttgcgatgacttggacaaaccgctgatccccacgtacgatcttacaggcggctaccgcggacgaggctcaggtcgtggaggtttcaactctggccttggatcgaataaagtccgggcttgagacggcacatgtacttgacatcttataggcatagcagctcgatatgacatcctagacagcatatttcttctcgtttgcgtcgtgatcacagctcgtcatggtcgtcaaccgatcgtcattgtttcgtcagataaaatccgtgcgtcttgccatcaatcaacggtgatggcggtagtcgcttctactccatgagaatcgtctcggaagagaggcgcaggttccgtatcggcaacctcagccccatcgtcggcgactgggatggatgcgggcatctcattcgaggtcaaaatcgcttcgtcacgctcgggcccggtttgttcctgtgttcctgtacgtcctggaagttgtcgcatgtgcgttcgaatcatttgctcatccttcttgacgtaaacgagcagatatggatttgcgttgcttccggtcatgtccccgagcacttctgttttgtcgactcttgtgacggtttcgtcgttgaacttcaagtactcatcagctgtatcaaatggcgatggttagacgtgtgtcattccttctggccgcgatccatcaaatgcttacgctcacttggcaggtcacgctggtacagccaataatggccaaagccagcctggccgctgcattacgaatgtcaattctgacctcgcaaaccggttaccgtcaattgttgcttaccggtgcatgaaaacggcagagagctcataagcacactcctgcgactctgcccaaacctcttcggtgagacggagaagctcctcgattcgcttctctgtggacgcgatatccgtctcgatgcgctcgctctcgacctttagagtagcttgcagccccaggatcccatcgtctttggccggaaatgaacccagtgcttccgccaacgatcgcatggtttctgcgatggggcctgacttttttgggccgcagatgagtatcgttagcaagcgggaaaagccgatcgcaagagtcagggcgaagctcactttcgagctgttcaatgatgccagctttgctcttgcattgatcaactcttgcgtcaaagatcgcgtctgagtacgtttctcaaagtctgcgtcgggaaggaatctgtccatatagatcgtctcgtcgaatttgacgtaagcgttacttttgtatggcctgcgcatgacgatgcaaatgtcagtggcattggacttccgaccgatttgttacccgactcacctcgctgtctcgcggtcaaattgggcacgctagattaagaattcgttctgtatcaacccctgttgcctttacgtcctatagtgcatgatcctcttacttcaagttgaatttgcaacactggtggtactttgcgcaattccaaaactttgagagccgttttgccttctagatcgaccttgtcggccacataatagacctcctgcagcttttcgtacaaagcactggtggcttcgtcccgcacgctgatgtaaacgctattgtaagcgacgtcctgagcagacttttctgaaaccgaagtagtctccatttgtttgctctcatcaagcagtaacctttggcgtgacattccaaaaaacagtctgcaccgagacttgtcgatattagtcattgtgaccagtgcgggtggacggaagggacaccagggcgtaccgcttgatgacgttatcctcagatttatcagggtcattcttggtggcgacgagggcgacagcctccgcctggaataatacattgtccaggcattcggaaatgtcatgttgccgacctgaacgacacgcgttaatgtcgtcctacgccattgtgtcaggagacttaccgaacatcatgtcgttgttaattgacgccctgtgcggtcgaggcggcagcggaggggcttgtaggctttgccctggcagcggtatcagagctgggtcgactgtcgaggtagtagtatcaagagcgctctcatctacgtccatcagcataggtccatccttctgagtctcctcgatcagattcgacagcggccttgttggtgatgctaacgcagattcagcagccccttcgatgggctcagcggaaagactcctggatccggaccgactcatgggaatcgctttgatgggacgaggttcgcttggctcggtcgatggtgtatgacgttcacatccggcgtccagatgttccgcaaattctcgttcatcatttgtgcgctttcccaaaacactttcggtcatagcgtcgggagtgccaacgatctccattctgggcggttcttcaacaatggtcgcgtctaccatcatgctatcctgctgaggtgctgcgatttgcctctcatccgtagccgtcaccagagctaagtaagccaatttcctctcgggtgccactgcagagtctacagctgtccctagagtaaggaagagattggccaactgtcgaacgactacgaacacattgtttattaaaacctgcaggtgacagcctagcctgaatcaaggtgacttacagtcctgtgcccgacttagctctacttgggataacaacctcccgccgactcgaggaagcgcttcctcgccgggagtcggtacgtccagtcgactcaaggctataatcgcagtgcggaaaggttcgatagtgttcagatactaaacgcggtagaagggagtcagcatgcttggccttgacagctgatcttatgaccgccgattacctggagcagagagttcaggtagctaagaagataagcaaaataccgttaggcatcgactatgatgataggatcaaggaaattaccaagtattgctgataagcgagagtcgctcatttagccacacacaattttgcaaagaacgaagaagtggggaactcacccaatgttatacagcccggtaggtacaggtttcgcaggcacatcttctagtggtacatggtacggatcagcgtctgagcgataggcggacgtcaacaacaacgactgacccgtttgactcaattgcatgcccagctccctctgcaggctgttcacgttcagtcgagtagcgatgagtttgaaatcgttaatgacttctttctgactagcctcgtctatcgcctctgacatctgtcaatttgggcatttgtgttagagctcactccgatacagtccgaccgcaaacgtacagctatggtatataagctatgacatcgattctccagtcagcttggcatttcgtgtatggatctgatacccgggaccgacctaggccacatctccgcatctacctgctttggatcgtcgacgctgtatttcttcgccacattttgcagggcgaaaaactcgtcgttgagctcatgtgctaggtcttcgagctcggggtggtgcagagtccgcgctatacgatcgatggcgcggtacaaggcttgttgcctatcctttttctcgccatcaccgtccagcatgctgatctcggtcttctctgtttggatgaccccattgagcgatgtaaaaagattctgacgccagagaccgtagtcgattttggcttcagtgggactgatcatcatgtcgggatgctcaggacaagtctcagacacgatattgtccagatactgcaaatgcgacgcaatgttctctgcatcgagtttgcatcagataggatcgcaataacactgagcagcgagtcggacttctactgaccttttaggagccccgcgtgaggggggttcatggccagcgtcttccggaagattgccatttcgtcccaatccagtagttcgccttcctccaactctctgaggagattaacatagagcagtgctccaccgggattgcaattaacctgagcgaggaaggcctgatagatctgatctattgtgtcattccatcggcttcccaagcgcctagtcacaggttccatgtccactgagtacgagcgcttggcatttgcagctagggatgcacgcgcgtggatcagtggagagaacgcagaacatgtcgggtgcagacatacgcgaagggttcgtccatctgggaactctgaacaaggctcttggctccatggtcatggctttggctgccgctcgattcatagcatgaagtatagcccttgaatcggcgactcgcaagaatctcgaagaagtcttattcgcccgtgggggattttcccgagctagtgcaaaggatacgataacgctcagcgaccgagcccgcagcggcgttttacgcaaacaaagctgtaccttgtgctgagtgtccctcgatcagcaatttcagttcggtccacgcgcgcagcgaccaagctcgatcttcccaatcgcgggaatgtgaatacgattgattccccggttgtcccctggagcggaaccctgcgcgggtcaacagctcttcactatacattgcttttagctggcctgtttgataaatgaggagagatgattactcacccgacagagtcctggccgacggtccggaggtcatccttgctcaggcaaccccgctggccagcagaaatcaaatccacgtcgtccatgtcctccagaccggtcagactttcctcttgctcgtcaacaatggcctttgtgatcagcctatgcgagaacggatctttagccgatgcactcaagagacatagcttgctgagaggtgctcactcgaagagtagactcaagacccgaatgtattcgtcatgtatcgagcttcccggtcgagggggcctttcctttagacgtgtcagtaaagtctcggggaaacaggcgggcatggcagagaccgtgtcgaaatagacggcaacattgcactgacagcacctcatgatagagcaggccgggcttgggttgatatttgcccattccgccatgatagatggcctcctctggccagactgattcggcttgaggagtgcgtcgggagggacgtctagatgaagaacgtcttgcaggagatgaaagtggtgttgctgatcgtgctccctgcacaggttgttcgccttcttctgcagatccgacccaagttcggcagatggaccgactagagtctcttggcgagttgcagattcgggcgatacggtcgcgttatgcgtgttggccattaccaatccattgtcttcgaggtaatcgactccgagacgaaaccagacgcaacagtcgtagcaataccaccaggcatatgcctccccattcgagaaacacgagtacagatcggaaacaagcctcttgaggtgaggatctccgccatcggcattctcctggacgaagatggccttgatcgtgtgcccaccgtgatgagggggacctctttcggcgagcctataagccgagataccctcgccgatggcattatcccagcgagtttttgacgggctgtccctgtaatccgattgctctgacacagaaggccattgcggcgcttttgcaatttcctcgtcatctaagtgattgtttaggttatagtcagtccgcttcaaggagtgtactttccttaaggcgttggctagataggcgacttacgttggcccgcgaaccattttcgcttgttatagttgttgcgagatcgatcccaatcgaaaggcgagaacataatggtacccttgttgagctgctcgtctgcttcttcagtgtcatccagcgggctggcttcgttcggtccacgctggtccatagtgagatcggtattgcgtatccgctcgttggtgaacgagtcgtgttcgatagcgagctgcggatcgaccacctcgacatgatcgacatccatcctatcgaccgaggtaccgctcgtcgcagtgaaagtctcgctacggctgggaatataggggggcggcagcggtgcctcggtcatctgattgagaccgagtccttgctcctggaccgtagattgcgacggtagcggagtccgagccaaggtagcgggagacgcaaaagatgctcttctgactgcgccctcagcgtaagagggttgaagggaggaggtcgagcccgagcgattatgatctgacgatcgattaatcacgagcttaccgccgtgaaagaccggaggaggggagctgcgaggtggtgaatcgatgagattgctaatagccacaggactgggtttggaaggagaggcggacttttccacgtctgtcgcgggagcgtcctgggtgatggtcgcccgtttgctggttgctcctgcatatgacatcgtcagacttcccattgcgggtgtcacttcaaccccaggagacatgacatctccagggctcgcgcaggttcctgccgagcctaccgagctaatcgtagcattagaataaggttgatgttccgtggtagctttaagggatgggttcttgctggtttgaccagtcgggagaccagatctggcgggtcgaggggaattcggcaatggcggaggtagccttcgggaactgctttgagattttgcttcctcggataactctgtggttgcgggagacatccttgccaaccgagggtcctaaagggtaagagcgtctgtctgttgagggatctggtacctgccgaacgaatttcacagctttaccaactggaattactactgctcgacttgatctggttcaattgcattctacttgctcttgatctttgagcgggggcatgacgaagacactctcggacatgcgatgccgtcataaaatcgatcaatttacacgtcatgatgaccttcgacctgtaacgtaatttcttgattgagtgatcgaatcaacctggaattgatggcgctgggatcgtccaagcactttctacgcctcctcgtcgatctggcccggcaggaatcttgctcagttattgtgatcacaaccaggaattctaaagtaatcgttcaatgcatcaactctcctgcttcctgaatcctggactaactcgcagccttagacattacccgattcgagcgcggatcaggtgatcacacggtcctgctaccgcgatacccctccgacttatctttcttataccccaccacaactctggtctgcctttcgatcgagcagcgatatcatcattcgaacaatataaagcgatacatcctaatttactttccatcagaacctcctccataatcaaattacgaacacgaatatggactacccctggggatcgcaaaaggactacctcggcaccgtattgtcttcgggaattgatacggcagataaatctccaaccgaacgcaaacctgaaattcctgggggaaagttcccagaaaggataattccctcctcttcatgctactactgttcaagccgcaaggttcaaaccaccccaacttcgagcaaaacggatcacaagctgcagccggaaccaacagcgaggacgtctggatttgtcacttcggcacaaaacatcgcgcatcgaagatcgtaagtcttaccgtagacgctaagattcggagtttcgttaagcatgatggtttccaagcctcagatcatcgcattcaagcttgaagaaaacagaaaggctagtgatcatcaccaatcccgtcaatactggcgctgaagcgggttcagaacaaaataaccaaagcgacaaggaacctatcgttacatctccgcatacattgaaaacaagttcagcgatcacaaccatcgagcgtcccaaatctcatatcacccgatttctggttttcgccatgttcgatggtaccgtagtcttgctcgtcgcggcttgcgtcggcattccgcaggcggcggctgtcccgtaccctcagtcagagccatacattttcgagcaagaatcgcagacatcggcgatagctacaagtgaaacgccccaagagacccataccatggatcaggcaggtttacaatcgtacagtgatttacagtatactactgcttttgcgggaatattggaagaaactgcatcgactacccacttgagctcgaaccatatgatcccgacgttgccactacaatcgatcgttaccgtcccctcagtcaacgtagccccgtcagggctaaatccctcggagaccgtatcgcaaacgacttcgtctgaaaccatttccccacggacgggagtggcgagtgtttcagatccgcgttttaatccagtctatcttattcctctggtcgggtttctcgtcactggaagcgccatctggctgtatatgcgaatcaagaggatcaaacgcgaagatcgggacgtaccgcgtccgccctcttgtaccaagtacgagccttgcaccgattatgacggcccggaggtgatcccaaggaaggacgaaaaggttgaaagctctcggatcagcctattgcctcaagcagcacttctcgatcgtgaacagtacattccgatgccttttttcaagttcaacaccgcccacaacacttttgaagaccagaacctctcgaagaacggctacattcagctcgctagcactacagagatgctctcaccaggaaacccaatggatagtggatataccggtttcctccgtcattgccccaacataaaaaaggccaagatcgtcattcaagcccctactcccgaaagtacttggggtcgctcgagctctgcggatgttaagtgcgatcccgtcaagaaaaaggcgctgttttaattctggagacgaatgctggcctcgaaaagaaaggccatcaagcgctcagtgctcgaccctgagcttttgattgcgggcgtaccctatagttcgatggcccgcctggagataggcccttcaacagtatttctcactcagcctacgatgaatgaaagccgctcgatgttgagccggtcggttgatccgctacagtcggactacacgcctctcgccgctatacccctagatcgttcctcaaaatcaacgtcctgcgactcgacatacagctcgtcaacagaatcccctctgagcccagtgatgagctctttcagccactgcagtaaggaatcaagcttgattgggtcgtactattatagtcccctcgcggccacgctagcgagtatgaagcgcgggatgacagataacgactgtctgatgacatccgttagagaagacgacgtggcctcaattcgatcagctgagcctgcaacacgccgcttggcgtctgttgttactccgcagtcctctaccaacagtgaacaaagctcggaccatgactctcttgcatacgtgcgcttgcatcggattgcgcaagaccctgatccctccgtggaggcggtcggtttgcgaatcatcacggaaactccaccacgaccagtcagggatctcaattcaccatctcccgtcctaacgataccgcggtactcaagcgacgacctggacgactccgacggaatgcttaccgatgtgaaggcggatcagcgttctgtgaaggctcgcaagacgttgaggggaccgcgcctgttgatccggaaaaatccggatcgaagaaagatcgaatacgctcattcaaccttgatagcggaacatcagaccgcctggtccgaaggaagctctcatcgttcgagaaggaaggtacgctcggatcagggtcattcaatcagaacgccgactggcggccgaccagtaccatcgcatatcaaattccactccgctgcgaggcttacagacgtctttgctatggcggagccaaaatgcgatttacggaaatgaaaggcaggcgtcgcaaccgttgtgctgccggtatcgtgggacttgaggagacagtgacatgatcaaaattctcgagcctcagcatatttgacagacgtctagttcgcataacgactgtgcgccccgacatttctgcccgtttctgcgtggtcggggaacgcagtatcgttggtgatggatctccgagtgttccgacatcatatagacagagccgggttgagtaatagagcatcggtatcttgttgtcgcgtgttttacagattatgaaatggtgagctctccatgtggcttgttgcgcaacttcggatcaatgtttcattggatatccttgcgggggaggtcctccttgcggatgcccgcctccgggcgccatcatcatcccttgttgcggtgggtagccagcaccaggctgttggaatctgtcatgctatgatggtcaacagcaagatccacacgtgtaattccacggacgacttactggccaggtcgctggaagccttccggagccctctgtggctcccagccgtttccttgtggctgctggaatcctgttcatcgccagggtctagattcagcgtggttcttcgcgcataggcagtatcccagacgatctacgtacggcagatgttacacatccagatatgactccgatgataggggaagagcggcacgaagcagaactcgaaccaatctgagctcttggcttgcacgacgctcgctgttgcacaaggtgtatcaggaagcgaacatagactgtggaacgtatgtcggcgtacggttatgacagttgggacacatccattgcaagccaggttcactttcctgcttgacctgcgtagacgtgcaaagaggacgaatgggctcattagtcttggcaagatccgattgacatagcatatccaaaacaaaccttcgtaggacacccaactggatttccaaggcaacatatcgtcagctacgtcgtaagactggatcctcaggtactgacaagtaaagcaaactatatttaagggtcagcactggtgcacattaaggaacagctctgggatcggcgagctcacaagccatgacgtcaactcctggttggctctggtagatttagtcagaacttgtaagttggttgggaggcgatgtctgaagcgtcagggtgacgattcaacaataatatctgacgataccctattattgaatgcaccctcgaagtaggtggcgaggctatggtagtagtgatgcatcaaagtgcggcatttaccttaagagcatgaagctgaaggaggtgaggtctaccttcggccagagacggtgccaagttcaattggctccgcgatatccgcggatcgtgtccttcccaacgtttccccccatctaggcgttgaccgacaatgacgtttgggcacggccatcgtcgagctgagccttgatcaagattcgatcagctatccgttaatgaccgctgaatggataactcgtggttggcagcggtgtctacatctactcattattaccgcgaacttccatctatatacaatttgatagcttccctacttgcaaccttctaccagtaattagcttccagctcgaagcttctcatcacatacattgcacggctagctcgtgacgaaggcggttcgcaacaccatggtcctggtactcattatcggagacctgcatatcccgactcgaatacacgatcttcctgcgaagttcaaaaagctactagtgagtccgcaatccaagcatctcgaattgaacaggccatgacaatatatactacaggtaccaggcaagatcgggcagatcctttgcaccggaaatatctgtgataaggagacgtatgattacctacgtacggtggcaccagaggtattgagcgtgaaaggagactttgatacggtcagtctcctatactctgtcgtgaatgatagcatacgctcataccctatctcacgcacataaaggccggtcatttcccgcaaagcgccatcatcaaccatggacccctgaaatttggagtcatttccggcactcagtgtataccaataggcgatgtggatatcctcgcggcgacatcgagacagatggatgtcgacattctgatcagcgggggcacgcaccggtgagcggagagagacagtcaaacggactgggcttgttactgataccgctgcttgcagattcgaagcgtttgagtatgaaggaaggttctacgtaaatccggggtccgctacaggggcatggagtggactatggccagggtaagttgtcattgctaagtggctcgtgacgaggagtaacaaggctttcattaacacctctcgcgaatgcacagcgaagctaccccatcattcgctttgatggatattcagggaccggtcgttgtcacctacgtctatcagctcgtggatggagaagtgaaagtggacaaagtcgagtatcgcaagccggacccagcagatacgaacggcaaagggggtaatgatccggcgagtttggcaaatctaggcacgacgagtagtgaggcgccagaaagcgtcagaccaggggtgtggtagacgctcgtaagctgaaacaaaagtttacgagaaatgtcaagcggcttccgttgtcagcgagtttgggagccgacacgaacactccgcctacttgcctgaggcaatgtgcccgcctttcctgcaacgccgaatctgtctgcaccgttgatgctcatacacatatgatagatccaaatgagtaatcgtgatgtagttagctccgattatcggagactctcgcatgacttgagcctacggcgtgatagatagaacgacacgtacacgatccacgtaccaagaacgtagttgcgccgcgtcaatccggcatcaattctcattaaattacgctagttacgctagcattcatatcgggccgccaccacaggctcctatgaggcctctaaggcctctatttctctaatcagtctaatcagctagtcatatatctttccttaagttttcgccttcgcaacttcaattaagatcacaacatcataaatcacatgggatctcatgattcgaaaggtgaaatccgtttccgcacgatccgcagggtctgaagatcaacatcttcaacaatttacaacacggttacgacaggcaaaacccaagatcatagatcacagaaaagattgcgcatcaaaagatctgccaggctgaaaaggtcctttggccctgttgtgctaataccaccgctaggtccctttcccacgctctcatgcagctttgatctcggatcaaacacctcgcaagcaccattgggcggcttcggtggtcagccgcaggtggcacgaggctcgtcgaggatcaatacccatcaaaggcatacctcacatcaaataatccccaaatctcaacagcttcttctcccgctatcatgatcaaccagatacaggatatcgtatgtcctcaatatacttcgtcttcattacagaagaccaagcggtattcgaccccaccgaacgatctctctcgagcgaccactccagagagtttctacgagaatttcggatataagactaccgattccgacttcgatttcgatctcgacatgggctcgaacacagaccctacctatgtcagcgctgggaaaggtgcacccgccctctatcgattgcaaatatcccacaaacaaatcctcaggttgaatgcgcctgaccaactctttcctagctatgatctggcgttcgacttgtcccacttctcgaaccaagtaagatgcaattgtttgcttaccgtaatctggacgaatagttgattcctgattggcagagcttcgctgataccagtgccaaagcacttgcgaacgcggagcagggaggaaaacagggataagcttaccccctggaactggcccggactgacagaatgcattgaagactcgcggggcaaagaacgagaggctgcccgagcgtatcgtcccgaggtcggctgtcagactccgacaaatccagtcgatgttaaatctcaaccccttccggaattctctaccctctcgattcatgcagaggaagcggctcagtgatcctgatctgcggtttcgaattcgttcgcacactatccacgacacatacgagattgcctctggccgctaggctacaccttgtcatttccttgtacgagactggtatttatgacaagcccatcagatttacgcatagcttgattggctcgttttgcctcgaccgcagtgagccgacgaagcttcactgacttcaagtttttcgtcgcacccactcgtcgtagcatagatgacgaatcaagcgccctcggcccaattcagccgcttccgcatcgatttcgtgactgcacatcttcctatgctgaacagctttatgagctgcgtatggccggtggctgattacttgcattacttgagcgtatcttttatattcgctttctgatcataacttcaaatcgtcgagcacaatttataacggtcaaatctcggggtcctgacgatcgatcttccggagcttctgggacgtcccttccggcagagcgagctagtgggatcatgccccctaaatcgggcaagaaggaggtcgctcagtgagcttatttagtgaggtgtggccgggatatagctgaaggtccgctccgtagaccatcgatctctagcttcttcaagccgaccaacattgctatcgcatcatcatccagtggtagatctgctgacccggaatttcgagcgatcgaccgacctcacaagagacagagggtcgctgggaatgatgacctgagcaaggagccgatagatgtcgacgctgaaccggatgctcgaataacactacaccatccgaaccgccccagcaagcaaagcgcgctcctgccgtccccaaagctctcgcctgatgcaaagggtgtggaacggccatctccctacgagaagcaagtggagaaggcattcgaaaagacaagcctgtcgaattttatcgctccagactgggacagcgagcaagatggcatgccccgcagtggactgaaaacgatcgcccatattagccaggataccgaattttcagacggggagactgccaatgagcagggcggtgaagatcggttgcaacggaggcggcggcacgaactttggcaaatgcgactgggacaagggatgatcgcaccgaggagaaacagtctccatttagatcaagcggagaatggagagagcgccgaattcgaaatgcttcaagaggatgtcgatgaagacgacacgaccacagcaggaacgtctcggagcaaaccacaagcaaagccgagcaagacggtaaaggcaactgggaaaccaaagagaaaggaagacatcggtccaagcggtatggcatatacaccattggaaaagcaggcaagagtggtgcttcaactttggtctgatggtatcggctgaacccctcgcttgagacagttcatcgagatcaaggaagcaaatcctgatgtgctgctggccatggaaggttggacgatagcgttgccaaatttggacacaaagctgaccagcgtcccattcatagtgggctacaagttcaaatttcatggcgaagatgccaagattgcttcaagggaactgggcatcgcttggtgagttgacttacataccatttttatactcataccaagctgatggagctggatctttcagttttccgatgagaaacttctacagcgcatcgataccagtacatcgaatacacattcatgtcaaaaagtataatagccacatctctccacgcaatgcaaaacaacgctcaatcaaggttcctcgacaggctcatcgctcgtggccacaaagttggagtagtcagacagacggagactgcagccctcaaagctgtgggcgacaaccgtaacaagccattcgagagaaggatgaccaatctatacaccgctgctacgtgcgtatgcgccccagccggatcaaacaagcttctaatgggctgaccgcatgcactcctacagttacgttgacgattcttcgttaaacgaggacgacttgctgacggatcctgccaggtctacgaacgcttttgtttgcatatcggagattaacgcaggcggaaacggcacagatgaccaagtccggatatccctattaggcattgttatcggaaccggcgatgtgacgtttgacgaattcaaagactcgcatttacgaaacgagctagaagtgtgtgtccaggtcttgcttaaagtcgtctcgtgctgatcaatagcgacttatatgaccaggttgacgcatctatccccgtccgaaatactgctatcagaaaagctgttgagtagaccgacagagaaagtcattgcaagctggatcgaccgttcagagtaagcgggttgtgcgatgcggcaatgaaacccttaccgtgctgaccggatcaaacaggagtaccatcggcaccggcacacgcttggaacgacgtgctttcttgaaaagtcgcgataaggcactcaaagctgtagctgcgttttaccagaagcgccacaaggggaccgccgcggaattgcctgtatgcgttgatttgctgagcgatgccgaagacgatgtcaatcagacagatacgctggactctgtccgcccgagcgatagtgagatcgagtctcgtcaggaagtccggtcgacttacatgtgtgctgagacagagctctacagtcgaggccagaatttctcgtttagagcaactgcctgatggcatatcgtgagttcccttctgcatcgcccgccgcactctacggatctgagctccttgcaggctttgcacagctgcttcgatcgagcacttgaagcgtgagccgctcgacccaatacacagatcctctgactgatttttttctttgggcaggtttcgatctcgcagatgccttgctacatgccgaagcgttcactccctttgctactagaagtactatgctgctctcggccaacaccctgagcaatctcgaaatctatcggaaccagaccgattttagccctaaaggcagcttgttgtggctcatggaccacacccaaacgaagatgggcaagaggctgctaagggattggataggtcgtccgttggtggatcgagatctcctggaagaaaggcttagcgcggtagccgagatcaaggacgacgccagtctcacattggagaagttgaagggcctgctcaaagggtcgattccggatctcggccgcgggatgagccgcattcaatatggtaaagtacgtacgtctactcgtgccaagtcaaaacggccatttcttatcaagttctgttcaggctacgcccggtgaggtcgcgacgattttgattgcgtttcaaagactaggggaagaattccacgcagatatgcctactggattgcctcaaaacgcactactagcacgaatagctcaatcatttccaaagatcaaggagccaatcacacgcttattatcggagatagacgtacgcaaagcgagaacggaaaagcctgaagatatgttcaagcaagcggatatgtatccaaacataacaaaagcacgcgcagtcagtcctgtaccatgccatcctgctggaggagaaaaaggccttcgctgatcctatcaaacaggcaatcgcggaatgtgaagcactgttagacgaccatttgaaagacatacgtcgcgagttgaaattcggctctctgcaatacgtcaccgttgccgggatcgaagtaaagctgcctcatgctcgctgtggatatgctacttattcttgcgtacgtttcgcagcatttgatcgagcttcgcctgaagcatgccgtccctgacaactggatcaagatctcgtcgaccaagcatgttgctcgatatcatacgccctttgtcatagcgaagtgagtttccgcaagctgtcacgcggtacttgagctcatcctcggtactgcctacttagactaaaagaactagaacaaggaaaggaaaggctggttgaagcaggaaagcaagcctttctacattggcagggccagatagcccagcattacgacgtcttgagagacgccacactttcacttgccacatttgactgtttgacttcattggcgaaagtttccgttggctctggatccgagtattgcaggccatcgtttgtccgtgatggtcgactactcgacctacaagacgtgcgacatccaatggtaagcgtggcgattttcaggtcaaacccggaatgccacgctaatctttcccttgttcctgcagtccgaggctctcatggatgattacgtggccaatagtctcaaattttccgaagagacaacccgagttgctattttgaccgggcctaatatggcgggtaagtctaccttatgttacataggtcaagagcaatgtgtgtactgaaagcgcttgagcaggcaagaccagttttactagagcagtagctttatgcctgatcatggcgcaaatcggttcttacgtaccatgcagcaaggcagagcttagcgtgcatgatgccgtttggacgtaagtctagcgcgattatcgcatgggaacttgttgatggagatttctcttcatacaggaggatgggcggtgcgtctgcacggccagcgatttcctttgccagatcgaattgatggtcttcgattacttctagcttctgatgacctggctaggaatcgatctacgtgagagaccggatccactgagcgttatgatttcgtatactgagtcagctcgacacatagattcatggtcgaactgaaagagacttcggatattctcgctggagccactcagaagtctttcgtggttcttgacgaattgggccgtggcaagtcatcccccaagattggcgggaaacttgaactaatcgtactccgcgagtaggcacctcgacaatggacggtacagcgattgcttgggctgtactcggtatgctcgataccttttacgacgatggcacaaaattgacagtcattgaaacagaccaactcgtgcagctgggatgtaacgccagtgagtctacagcaagactatcaaggtctcccgtattcacttcttgatccttgcccagtctttaccactcacttcccggcacttgccagaatacacgaccaatacccccgtacgtctcgatcaagcacgacgaccatgtagatagcttaccaggtacttctcaaccttagatgtggtctctatacaccatatgggtttcacagaaatacagagggcaggtgagtcgtttcttaagttgccaccttcgattgggatccatgacaaatcgcacgatttctgatcgcagatggccagccagagatcgttttcctttacaaattgcttccttcgctgtctcatcggtcttttggaacatatgtcggccgccttgcaggcttgccgcaagcggttctcgaacgcgcagaccgacaaagtgattggatgagaaaaaaggtcaaggattcctgggcgatcaacttggcgagacgggtcggccagaatgtggctctggaaagcgatatccaaactgcagatgtcttagaagctctgagaatggtaaaaagtggccatggccagtgatccacgtatgtacagatgcatttttacgtagcgatatatcttttctatggattcatgcagttgcctggcaaatgagatatgcccgacatgaatatgtatcgttcaatcagtccaacagggtgatatatgaatccgtggctacgatgaagattcgtatgtccctagtaatccccccctttgcccaagtccttcctcttgtgatacacggccatgctgggctgcttcccttccttctgcatatcatatgcaactcgctcggcagcttccagtactctcaagacgttctcccctgccaaacctgccaactctctctgcttccatccgcgatggatcagctcggcaaactattcagtaacatgggcaaaggatcgtgtgattagctgacacattggtccagtacgcgtatcatgcaggctcacaagttccggatacttggaaacatcctccaaaccttcagggacggtctcaacgccatcataatccgaaccgattccgacgctacgagccacaacaagcatcagtcttcgttcgccgtaataggcacgctggttggggctatatcttactgagctttccctgaaatgctagcgatgtagtcgatgtgatcggccaccgtcttgacatcggccttctgtccggcagggagcaggaaagccggatagaagttgaccatcgtgataccttcgttcctgccttctccgctaccaattttaagcaggacctcattgggcacgtttcgcgatatgttgttgaaatgccgcgcatcggagtgggacaagattacggggcttcgagtgagctcactgaagcaatcgtcggtttattatgagctgcgagcgttggctgtgtcgaacgggtaccacatggtctcacagtgcttgcaaagccgtagtatcggcaacatggctgatatcgatcaacactgatctttctcgtctcagtacgcgctcctgcagcaatactttgtcgtgactactcactgccgaggcggttcatctcgtaaatcagctctttgccaaaggacctgcgtgtgcatgttgtggatcagctggacagtcgtcaccgagcacagccttgtcacttacgataatcctccgtgaaccggttcaacaggctcgaagatgccagccctgtaacattatgggcgcgtcagactcggttacttggtctaaattagggagtggctcacgaatcggcgaaggcattctatcgagatggtgagaagtcagcctgaccagttacccaagaggacgcggcgatgatggcgagctgcttacgttgcatgagtgtgtgagggtcatgtagcggacaccgagggcgtagtactgtcgcaaaactatcgaatcatcgagtttgtctcagtctacctttataccaatacacactctggtttgactcaccagcaagggagttgcccagctggtgtgctctgatcgttttgacgcgcggtcagatcaaccgttatcgtctcgaagggttgaaggccaagctcacccttccactccaagcagactcgcaacctttccagcatagatcgcatcgcgagcttggatagcagactcgcagtactcaaaggtatcgctgtacttctcgataaggagcttggagacgtcgatctgttccagagtatccctgacgcggttcgtcgggagcaggaagttcttgccatcatcgacgcagtcgacatagaccgagaaaaacattcctcccatatgaccctgtctcatcctgggaatatctacatgaccaatctgagcgagtaaagacgtagtcagtctcgagccttgcgaccgtagtccctttcaacgtgaacgctacgtacagtctgttttcggagatcgaccttgtcgagatcgttgccatacatgacccgcatgagttctggaagatcgacatgtccgtccaggaccggcgaggccgacagataatactgcgctcgcttcagagggtccttgggcagcaaagcattttcgcctcggatcccgatgaagatgcatgctccgataagaacaaggacgaccaggatggttctggtaggccgttttcgctgctgtacagcgatagggtgcgagtccgctgaggaaggcaaaagcggggcgttttcagacatggtattcgatgtcgcttatgacggaaagttggtgaccgagacgaagagagttatggagaaggagtacaggttgatatctaaatcctcgatactactgcgtgattcgatcagcgagcggtgtgcgctttcggtcaaggccgattcggtacagaatgatcgtatcaaacaagtcgagtcattaaattacgcaacagcgaccagacgtgacgactagggcagatagggggagagaatagcattggataaaattatatgcccaagggcggcattctactatgggattcttcaaaactcaaggggtcgcgacagagcagctaaacaagactggtcccgatcgagacgtttcgtcatccacaccctgcctccgttgcgcttcctggtcatcgtgaattagagctcggccttgacagactgggaagcacgggcagactccttggcaagagaagccgagtaagagctagcactcttgctggcgctggaagccgaaaccgaggcaaccgagctgacgctcgaagcagaagccgaggcgacagagctgacggaagcggcggacagactggcctgtagagttggaaaagcaaaccagtagaggcgatgagtatctccgtttcggcaacacgaccatggctgtcaactgaccctgtggtaggcgctgctcaagctagcagagacactgctggcagtcttggcggcctccttggaagcgctgacggccgacacggacaagctggacgagacgctcgaggcagacttggaagccgaggcggcgtagacggaagccgacttggaagcctccgacgcgacgctgtaggcagacgagctcatgtaggcagcggcagacgaagccgacttggaggcaacgctggcagcagagctggcgctggggctgcccgacttggaagcgatgacgctggccttgctggcctcgactgagaggctcgacgagaccgaagcggcggcggacgaagcgctggccgatgcggaagaagccgagttgctacgaggtgcatccaaggtttatcgcaatgagtttgggttccactcgaaacacatgcgcatcaagactcacatggcagagtgggaagcggaagcagcctggttgacggcgttggcaccgagggagctagcactggcactggcgaccgagacaagggacgaagccgaggcggaagcagcggcgtagttcttctccaattgctgctcgagggagagcttgctaccggtcaagatctgcagtcgtcgagtataatcaaatcagcagctgtgcctttcccgaatcgacgacgattgctcagaattcacctcgaggaccgagctgagcttatcctcggcgtagtcgactccaccgccgatggcctccctgatcttggccaagatagactcgactcgagagccggcctggacgtaacggactgggatgggcaaaaccgatgacgataagcttccctcatggttgcgtcatcaatcaagtgatgaatctactcactcctgacttcgtgaacgagcgaaggtcgagtggcgtacttggtgtcatcgactccctgtaagtatcagacggtatcagccgcattctccttccatagtcgttcgcataaagacaactcacgtggtcacgcaagtaagccctcaacctcgcatcgggccaagccaagtaaggggccgaggtggaagcctggtacttgtcaccgatcaacttgatcatgtcgtccctctgagcggcgtagtcggacttgacgaggccgtgttgtacgaggtagtccctgagctcagagtcgtgccatcccgaaaagacggtcgacttggccttgtggtagttgtcctgcaagagcgattcgtacttttcacgcttgagatcggctgccgagttggagctggatgtgggggtaaaaggtcagccgtgtgccccttttactgcaactgcggcccgaacgatgactcacatgataccctccgagaccaaccagtccctcatctggaagtcggaccaggtggtccagaccttgtccttggcctcccagtagttgttcttcatcagcatgagcatgccctctcggtcgttgggggtctggaggactccgtgggcgaccaaccatcccttgaggtagttgtcggaccaaccgtgatagacggggtcgttcaggtacttgtggaagacgttggacatcttctggagcaacaagtttcgggggtgggtagacttggcctcgatgacgttcttctcctcgaggtagttcctgaaagaagaaagacgaggcgggatgcaacgacgtgcgggtcagcctcgcggtcgccgcggacatctttgaaaccgggaacgtcgactcacctcaacttgttgtcgtcccaagtgctccagacgtaatccttgcttacgtccaagctctgctgagccttggcgctggcgtacgttcccaaagagctggcgctgacactggcgctgttaccggcggcgacggcctggttgtagagcgacgtggcggaagcctggacgtcaccggtggccgagttccatgcggaggcggccgaggcggtggcctggtcggtagggtgaccgtacatggcggtcgagacggcagaagccctgatcattcgtaccagacaggacttggacgatcagcgatccaagcgtacccatcgatgtgatacgaagcgaaaaaaagactcacctctgcttggcggcgatcctcatctcctcgacggtacccttggggctgacgactccctgttccaacaagaactctcgcaactgggactcggaccacgagtcgaccgccttgtccgagtaggcctcgtagtaggcttggccggcaccgacggccctggcacccttcttggcgacggtgtcaaagttgtcctggacgactcggaggagatcctcggttcccttggggacctggatgttgtgttccgacaaccagaccttggcctgatcgaccgaccatgtcgaagggtcggctgcgcagagggaaaggacgaggatacgtcaactcttgatcggtccaggtagtttcgcaacgagcaacgagtcgactagacgatggtctcgcggatccgatacttactggcagaaggctccttgccaaagatctttgcgttggcaccttgtccagcgacggcggacgcgaccaagacggcggcgacgttgagcttcattgcgtaggtcttttttttgtttctttactttgcggaatgtacgtgagaggtggagacggcgtttgcctgtttctgtggatgaggcgtggtaaaggttgggtttacgaacggtgccgtggttgatatagatgcgaagagggtagttgatgacggcgggagaagcgttgggatgatgatgatgatgatgatggtgatgatgatgttatagggagacgtagagaggagagagagtgtgtgtagaggagtgtgtagtgtgtgtgagagggcaagggcgagccaggcagtgacgacgtgaaagaactcgatgacggtgagcgagagcgagcaatgtgcgtgatgcgatgcgatacctaccgtgatctcgcaagcaagccacacgcgaatgacgtcatttcttgatgccggaacgatgaggtcacggtgaggcgaggcgtgggcgggcgatggtttactccccatgacgacgcgggttccctgcctcgcgcctccactttggccagacgtaaggctggctgctggctgctggctgacaccgatcatatcagtcacgtcgataacgtagtgaccataggcagatcgatttacggcaaatcgtttcctttgtcgaatttgtcgcaggcttggattcctataagcatataggtatggtgaggatttacaaccagaatgagaggaaacgatcacaacagcgaaaagacgaaaaggcgaaaaggcgacaccgatgaaaaagaaaacatgaccagtgtccggggcgcgggaagcccaaagtcccacattgagctcgagcgcttcacgacccattggtacctgctccggcctgtccacccgccctcgtcgtccctctcgcccgccttccccatcctctgatactcgcaagatcaccttccctctccatctcgttgcatgtgaccaaccccttgagctcgtccaagctcttccccggggcccatccagcgaccttggcgtaccccgtcatggcaggtcctaccctgatcgtcgtgttattcggaccggtcgatttccctccgttccccgagatcccacctccagctccacctacgccccctccgttcagaccacccccgttcgatccgtctttcccgttcccgttcgacctcgcatcgtccgcaaagggtgtccccgcatttccatctccgagcatgttgacagccgcattggtgccccttcccgcccttcgagccgtctttccagcacctaccccggcgggaaggttcggagcgggcaggaccgccaggctgtagggcaagggggagatgatattctccgtcgacatgcccgtcgtcgtcatgggcaacaaagtcgcgaggagtgcgtcggcgttggctacggtggatgcgagcgtcgacgtggcggtcatcatactaccctgcttgccggcgattgttgtgccattctgtggcaccccggcagggttgggtgtggccctcgtcgattgtggtggagaatggccgtacagatggcgtttttgtgttcgagcgtttcgactaggacgaggtcgaatctgagcctcgaggagggtctctgtgttgtatcaaaagatgtacgtgacgtatcagagacgcttgacccagacgtggaatgaacaggaagcaacgagccggtcgactcacccgcaacgacatcccccacactctccttgtcctccctgatcttcctcctccgatcttccaccccgtccaataaccgctgccggacgagatcacgccccttcttgaaatcgtcctcaatcttctgtcgttcgagcgagtacaagtggtgtagcgaatcgtttctgcgggtcaccagcgaaaggacaagaaaacacgtttctcgcccggtcagttccgatctcggtctgggcaagatcattacgactagactgaccgatattcccagtgcatatctatgccgtttaataaggcgtccctttcgaggttcaacaggtacagggggatatcgagtggacggcaggtggatgggtcttttgatagattttgattacgctgtgtcaggtccttgtataggtcctcgtagatcctgttgcaggggaagcaagaacatgtcagtcggactgttcgtatcgtcgctgcttgagagctaggtcctctataggatgaagccggtgcatcttccaggcgtgctctttctggcggacctttccaacccaggctgacaggcggagcacctcccgctcgccgacactcactgatcccgactggcgaccttttccaggtgatgtctctcgaccctctcgataacttctctccgcttcttgtcccgtttcgattcttgaggtcccatggtcatgcctgatcctcctgtcgaagggcctgcgatcggatgggagaccgagtggtgttggtgtcgggacatggctcgggtcgagctgagctgagcttggttgccgcaagtgatggggctgcgacggtgcaagtgtttacggatagaatctccgtcctctcctggtgtactttgaggtgctggaaagcaccgcgatagagccgatgctgcaagatgtctccctaggtctgcccatccgactcccccctctctgtgtgtgtgtctgtgtctgggtggtccccttcggttctgccttgaccggctcgattcgcttccgccagggatgtttgcgcgatttcattttcacgtgatcatcataccccttcataatttccggacagaccctccctcttccttcccctggtcgaggtatatatacagctcgactatgacatgtcagtcaatccatcttcactcacgccgctcttctcttcttcttcatactgccgaaaggcacgtgcggcgggggtcgtatttacttagtttccctttgttgctccggccacgactctcttcagccacagatcgaccctagagtctttcaaccgaagagcgactggtcgtcgagcgtcaaacggcccctcgaaggagtctgatcgcgggattcgtcccggcgatcaggtgggaacgtcttagtacccgttcctcagtttgcccgttctctattagagagaacaatcgcttttgatagagcggtctggttctggggagggtcggtggttcatacatttacgtcgaagcggactttctctttaattgtaccgttgcatttcggtatcgtcactttaatacaatcgtaccgctgttacgtatccgtccgagaatccgactcgtttccgattgtcccttcacccgagcttgtcaaagtccgttcccgatcctcgtctcgttcgtctcctgtgagctggtgttgttcgtgctcgccgtttccgtcgttctgccccttcttcacgcgattatacttgcccttgggcttcttcccactgaccgctcctttcttgttcttccatacccctccatatcggtatcctttcttcctcgcctcgaccgatccatcgactacgcctccgctagcgatcatccagcattttccgggacagaggaggtaccacttcccttcagcgtcgacctcgttcaacgcacgggtttgacatcggataaggacgtccgagggggtctgacagtggctgcacggcttgctcgaagtggagggatcgagcttccgggattggtgcgccgtcaatgcctttttcgatgtggtgggcggttccatcgagggtgaggatgtgtcggtagacatgcgtgaagaagaatctcgtcgctgtaccggtgtcgcgatatgtatgaagagctgaccgctagtgtggaaaggcgattagaagtgggccgcaatgactcggaagcgagctgtagctttagtacgcagtcttggccgattgatctactttatctgtaatctctggattgctagatcgatagctagctagatcgatcggcgttgcatccgtcgacgtcatcaggcgatgaaacgacctgcatgtgcgtgggcgagacgtgaatttcttgcatcaagccggtacaaactacatatcggaccgatgtgtcactacacccctggatcttgatcttcagacatgatagtctcctaactctgtgatctggagtaccgaccgaaaaaagcgacctcatagcgacttttcaagagatatccgatgcttcttcgactttacctcgatctccatcaggcgccgatccaagagttgccaactgtcaaaccgtcaattggaccatcctacagacaggaagaacgcgctgtatggcaagcctctggagtggtatctgcacctgccgaaggagagcatatgcgttctgcccaaagacggcctcatgggcctcatgactggcagaatggattggcagacgaaaggtccgcgggaacccaaggtcggactgcgatgccggcatcttcacatcgtcaacatgcgattatccagaaatcccgcaggcagaatcgtaccatcagaaccagtaattcagcgatcgtcaagcgtgcaactgcaactggacgactgtaccaactgtcaaagcctttcttcgtgtatctactagggaccttgattcctacttgatttcgtaccgattccgagcaaatcagacttcagaaagcccaaccctggtctttgaggaacaagatgtcttcgtcgcgaggagatagtaacagaatcatcatagccgtgaccggtgccaataggtaggtctctttgcctttccagaacgagacgagttcaaatgtggacacgactttctatattatagcggtctcgggctgggttactgccacaggattctcagacagctatcaaccgctccttcggcaccgcctcctgatgctctcgaaatgcctaggggagagggccgcccagccaagcgtctcgcagcgaccgatccatccgtttcgaaatacacttcgaccgatcatcctccaacgttgacgcttatcctcgcctgtcgatccagacaacgagcggaagtcgccatcaagcagctgaagaagcaacatgagctcggactgatcggccgcaagatgcgtggcgccgaggagaggaaaggatggttggaagggctggagatcgtctttgaagagctggatgtggatcgagtcggtggccccggtggggtgctagattttgcagataggatccgaaccaagtgagtccatcgagaatccgggtacttgactttttgctagtgattaatctcgttgaccggcatagctaccctcatttgacaacgctcgtcctcaacgccgggatcggagcatttacaggactagactgggcgggagcgatgcgccaatttatcaccgatccagtaggtaccgttctggaccctcattacatcatgcaagagatcggaagaaagagcggagacggtctaagaggaggggtgtggggagtcaatgtcctctcgatgtacatcctggtgagcgagatcgtcgtctcggccacatcattgatgggtgttcacactctctctctgacgctactataggccaaggagttgcgatcgcatatagccaggtcgccccaagctctcccactgtcgccccggatcatttacgtcacttcgtcgcagggcaaagctagcttcctgcctcgaccgccttcgagcgacaagcaacttctcgaactggaagagagttatggggcgagcaaatacatcggaagcgttgtctcttctcggctggactgggagttcagcaagcgagattccagctccgaggtcgaaacagcgacagcatcgtcgcgtgagtcccgaaaggtcagggtgcttaggctggacccgggagtcgtgcagacgggcatgttctctcagtggttgccattcttcatggagtgggccatggtcgccgtcttctacattgtcagtcgctcgaatgattcggaaagtgaccataaatacaggtgctgatagtgctcgcggacatctcacgcattgcaggcccgatggtccggatcaagaccacacgtcatctcgactgataactctgccttgggattgacttaccttactctcacatccgattcgacgttggagcccgccatttcgccgacgcaggaagaagaagaaggagtcgacgaaaggctcagtacggtatcgggcacgacgccgctcctcactccggaatctaccaatccagctcccagcatgtacctctcccaatcatggcgaacagggagaccgtacgttgggctcgagcgtgtcaaagattgggaccggtttgcagcggggctggaaggaggagacggattcttgctagaatgcgagagagtctatagggaatggaaagagaagaagaagtttggcaaggatgacgttggttcggtcagggaggaacagctacgggacgctccgaccggtgtaaagaccggatgagcgaccgatacgttgttgttggattgaagcagtcgttgtagattgtcgcataaagtcgcagctacacataacttttgagcaatcctgtaggacgtagaatggttacggatccggtgcctactagtggtatttctcgacgagctgtgagacgcgacgcgactaaatgacgcgtcggaatttgtacgttccagggatcgggctgatcgggatgcatcattcgatgacagagatctctacctcgagcgcctctccgtccaccttacaacgttctataaaccgctagctttacctcgtcgatccgttgtctgtcggtcaagaaccagctggtttcaaatatatatccggtcctcagaaactcgacaattagactcgcccatcatgggcaaacagtctaccttgggcaagttcttcgagttgccaaaaggtactccccctccggcaaagcagcaagcggacctcatgagcatgtgggcacctaaagctgtgaaagaggagaaatcgtcggcaagttcaagctcagtcaaggtcaaggatgagccgtcgagcgacaagaagggtaagcatttggccgcataactacaaggcatgaaggctcaatctcgtcttgatccgcttttagtgtcgtcttccaggaagcgaaacatcataacttctgacgacgaggatgaatccaaagtggctagttcttccagatcaggagaggagcctgagcacaagaaagccaaaattcaagttggcgaaacgatcgaggagatggcacaagacgtgcaggatatcgctgctcaacagctcaaagacatcaaacaagctcccggagcggtcgaatccggccacagctccattaacgtcaaagaagagggtccgaagacgtcattcgcccctgcttcctcatcagcttcaagcagtaaaccgaaacttagctctacaatcgagaaacccaagagtaaagggaagggcaaggcaaagatcaaccctgacgaggacgaggaagaggaattgaagaaggttgatgatgaagggacggaatctcccgatgatgcggatgacggtgaagacgacgatattaaggaagaggccgataagaaggagatgaacgacgctgccctgaagctcgcttcaacctatgctggaactctggacagcgtcacgaaaggtggatctcattggaaagaaggtgccccgtaagccagtaggagaagacactctagcgacagctcaatcaactcaacctcgtatcttcgattacctacgcagagtgccttactcggctcttacagattgcttcgaccaaattgatcaaaccaccaagcgactgctcatttccaactacctcacccagtttctgctcaaagtcgccttgaaccctggggagactggggaagatttgaaacgcgtggtttacttgtgcatcaatcgggtatgcgattcgtgcgattcgattaaagctcgcaagtggctcatgatgcgtcttctagctatgcccagattacatgggtatcgaactgggaatcggggaatcgctcatcatcaaagccatcgctcagagcacaggaaggaaaccggccgatatcaaggccgatctttcaaaggttggagatttgggtctggtagctgaggtgggttccgagtctgatgggcgattcgagccggactatgggtaatctaacgccagatctgaacaatgtagcaatctaagagcaaacagaggacactcggaacgccaaaacctctcacggtcgctttcgtcttcaagaccttgacggatatcgctaacacaagtggggctcaggtagatacgataccacatctgatgccgaccgaagtatacaagctcatcgtccgctgctcatagtcgcaaagccgaaaggtcggactgattcagaaaatcttgacttcatgtcaaggatctgaaactcgtttcatcatccgatccctcgagggcaaacttcgaatcggcttggccgaaaagactctggttaccgcattggctcatgcgatcgtgttgaaggagtgcggcaagaagaagaacgtgtctcaaggagagctcgcggagaagttggccagaggcaacgagattgtgaaacaagtctacaggtaagtcaggctggtatgggcttggtgacgaagctgactcaacgagacccgtcagcgagctgccgaattacgatctgatcgtaccagccctactgtctcatggagtagatggcttgagaacagcatgcaagctgacaccaggtaagtcattccgatgccgaccaattcgaagcgcatcggctaagcgtgatctgtctctaggcgtacccctcaaaccgatgttggccaagccgaccaaagccatcggcgaggttttggatcgattcgagggcaaagacttcacttgcgagtataaatacgacggggagagggcacaggtgagagcaattgcgccagccgacaggtgcttcattgatcgcccgtctccggtcttcggtttaggtccacttgctggagaacaaacagattgtggtgttcagccgaaacagcgaaaacatgagcgccaagtacccggatatgatcgaatcggtgcccagcgtatgttgatgatggtgtcctcgtgtccgccccgattgaccgaacccttgaacatccacatagtggattggccccgaagtcaaatccttcgtcatcgatagcgaagctgtggcatatgacctgcaaaccaaaaaattacttcctttccaggatcttagtcgacgcaagagaaaagatgttaggactgaagatatcaccgtcagagtgcacgtctttgcgtttgatcttctctatttgaacggcgaggtaatgaaatcgtggtgtgtgtccgtcgatggctgccactgacaccgaatatgatcagtccctgttgacaaaggaactgaaggatcgacgggcgcttctgcaaaagcacttcaagctggtcgagggcgagtttggttttgcaaagagctctgacgggaattcgagcgatcaaatcgcggaatttttggatgagagcatcaaggacggatgtgaaggcttgatggtgaagagattgactacgggcgactcaacatatgagccgagtcgtagatcgatcaactggttgaaggtgagtagcagtgatctgtaaaattaggcatcttctgacctgttcgctacaactcagcttaagaaggactatctgagcggagttggcgacagcatggatctttgtgtcgtcggggggtatcacggcaagggtaaacgtacgaacgtgtacggagctctgttgctagcttgcttcgacgaggacacggagcagtggcaggtgagcggaattatcgtctacgacatttgcgtccaatctcatcttctggattgtcatagacggcgacgaagattggaacggggttttctgaacaacaactcatagagcttcatgagcttttgaagcctctcgagctgaccgtgaaaagaggagatgtcttggcggatccctcgaagccgcccgacgtctggttcgaaccgaaggtcgtgatggaggtcttatgcgccgacctgagtctgagcccgtaagtccacccgcagtgtctatgttcctcatcgtagctctcaatattatcgctgtacaggatctacaaagcggctcaaggtcttcaaggtgacaagggaatcagtcttcgtttccctcgtttcatcaggttgcgagacgataaagatgcggatgacattaccacagccgagcaggtgagttcaatggctgttaagtcgaatgacaatgctgaggctgcgcgcgtataggtctctgagttctacgagagtcaagttctggcaggtggcaagaaagctgatggaggcggtggggacgactggtagacctcgtgttgaccatccaagccattcaggccattgtgcaattgtagtgctcacgatccgtaatacgatagcccaatgtgacacatgtctgcttcacccctgccgaaatatacgagacgtttaacgcggggctcttgccgcgagaaagcgcatgcgcgcttaccaaattatcgaagctaccaaggcactttgtgagattagatcgttttgtgcgatcaggtgatgataccaagattgcggtcgggacaggtagcacgactagttgatcgagccgataacacctagcagtatgtcctccttgaccaagagtggcagcaaaaagcaccggtccgaaaaggagaaatccaacaagcacaagaatcgagacaagggcaaggctaaggtcaggattgctcaggcggctgcctctgctccggtacagaatgactcgccgttcttatccatcaccagcaagattcgaatgagcgttccaccagcatttgcgagtgatctaagaagaggtgccgaagagatgctcgacagcttgatcatgcggtgagctcctgcgagcgctggagtccgggtccgcaagactcttacgaatcaatcgttttcagctactctcctgctttagatgccgtcctattggcttatagcaacatcgaattcgatgactcgacggcgaatatcgtaaatgactgcccctttgcggtctgcgatatctggttcgatgccgtcgtttgggcgccaaaagttggcatgaagctttgtgagctccgtcctgaactctgttttagtgtcgggctcgcttgctcacagtataaccaccgacagacggaattcactcgctttcttcgccatcacacatctccctcatcctctacaaaacgtttaacgtctcgataccgctggaaagcatccctcaaagccgatatagctatgaagaagcagacgaggtccaggatgccgatttcgaggctgagggcctcgcgcaactcagcgggcgttggaaggacacgaagacgggccgggtggttggcgcagacaaggaagaagttggcttcgtggtcaccaggtaggtcgacggttcgatcgcgaaggcagcggatgaatggcgactgaactgcctgctcttcagtttgcaaacctcaaatcagatgctttctttgaccggttccctggtagcttccgatggtaccactgccgcgtcttcaagcacggcggaattccaccgttcgatcccccccgctcctgggagccagctcgccaatgagcttgcatcacggccgtcctcgtcaaccaatcctgcccatcttccatctcccggtgagaacctcattgtgacggagaagacgacgaagtccaagaagaaggatagccggacatcgacgactggtgcggacattgccagctccgcacaggtcgaccaagcagtacatgaagctcagccttcagtacaggctgcttcgatgccagatattgaggacgaaaacctgagaagccatcgcaaagagcagaagcgggccgagaaggaagcgaagaagcaggccaaacgagacaaagacagccacaagcagacggcagatcaggcccaagaaaggacagaagctatggttgccagagtgaaggatgaggatgcgtcggcaacaacctcgccgaagacgaaggagaaaaagcacaaacgaagtgcagatgaagcggcattgggcgagaaggccagtaaaaggaagagggtctagacatgcgccagcagcgagttgtataatgcttcgccgcttggcggcatgcacgagagggtagctccttctttgttgtaatcctttacgccttctccttataacgataccgtcaatttggttttcagattctgagatttgcaagaggggtgttcgcatttgagaagtatagtggtggtatgagcggggcgcgcgcgcatcagtcatgtttgagtcactgggccatttgacaatggcgaggcaatggcgtagtggtaaaaccacgacggaccagatgcgtagcaactccttatctcacccaaggatccactcacaacactcctcgggagggtcagagggtggacggggttcgagaggacaggggggaagtttgatcacaaactttttgaacctctagcagagtctcaaggctctgtaacagctgtagcacctttttcccccttccgcagttggcagcggaggttgaggtcagacgtcgcgcgttcgattcctggttcacctactctttgtgcgaagatcggcagtaaatttgattccggaagactcgatcgatcgggatatccgcgacgtcgatcaccggctgacctccggccatatgggcacgtacggttctggtgaaatctgcagcttgaacagcaggtctaaagtattcttgccaacaaacgcatgaacatctctatcggcatcaaacgcacattgacaagatccgttcttcccggtctaaaacgctgcgaatcagccatgcctcaaacgacgctcggaagaggcttaaagctttcgagcaatccaccgtctccatccaaacccgccaaaatcaagaatagctcaaagtttaccccagcggtcgccgctgccaaagctcacggtaatcagggcaagttcgctgggaaggagagctcgctcaagtcggacctcgagcaactcaatctgcctgcgacgtacctcgaagatgtgtatggcgaacaggtcgaacagggtcacaagggaaacgaggaggccaaggatgttcccgacaaagaagaagtagaacaaggtagcaaggtggaggatgatatggaagtaaaggaaaccgaagggaaaaagaaggccaaaaaggaaacgagtaactacgctcccaccaaagacgacgtcgacatcgaggatccggaccatcgagctgtcgagaaagacgtgcaggatgatataccttcgacagatcaacagaaacatactggaaatgccagcctatcgcatgtaaagcgagataagagcaagtccacttcaaagcaggagagcggcaatgatgttagtgggatggcggacggcagaggaaagaaacgggctccgagtcccggcgaaggaggagcgatgggcgatagaggcaaacgacacaaggctgcgtacgaggtgcactcaaaggtcgctcatgcagtcaacgctgctcgagtcgatcgggaaccgccgcttgataagcttcttgctgcccaagagaagatctggggttataaggccaacggacctgcattgaccagcaactgcaagcccggtacccccctcaagggcaagaaacccgatttcaatccgatcgtcttcaagaaggctggatctgacggtgtcgacaagggagagtcagtcgtatattggatgcgaatggaggacgtcagaggcgagtctttgaacgtgttatgagcgggtactgaagacgttccctaaccagtatttggatcacagtcaaggacaacagggcattgtcactagcctctgactttgctcagcaaaattcactgcctttaatcgtcctgtttgtacttgtaccaggcgattacaaggctcacgaccgaagcggcagatcgatcgattttcgattgcggaatctgcggaacatcaaggtaagttcagctgtaattactgctccgaaacccgcgctcaaagtgattccttttgccaggccaaattggatgagaagaatgttccattgcacatcgtgacgcacgacggcaaccgtttcgagctacctcggcagcttatcgacagcatactccctgctctaaaagcgacacatatattcgccaacatggaatacgaagtcgacgagttaagaagagataccgagttcctagagctagggagccaggccaaacaaaaggtccgtgcaatgttcgttcacgacagacttgctgtgcctccgggaactttcaagactggtcagggcaaaccatacggggtcttttcgccatggcagaaaaagtggcaagcgtttttggaagctcacgaagaacacctcttcgaggcggcggatccggaaagcaacgatgaaggtatacgacaacacccggtatacggaaagatgtttgacgagaaggtacccgaatacctgaaagggtttgaatgtcgtgacaaggaactcatggaagtgatatggccagaagggactgaagcagcggtacaggtaagtttaggaaatgtttgcgagacaatctgcaactactgattggctgtgactgggcaggttctcaaccggtttctctattgttccgcgcgaaaagcggaccttggattggtcgaccctaagactatgggtcaggaattgagcagcagccttgagtgtgacgacgaagtacagttgatagaagacaacccggccaagaccagcaccaagagcggtgcaaaaggcaatacaaaccctcagactagacttcgagattacgcttcgagccgaaattcggctgattccaatacctcgagccggttgtcaccatacttggcttcaggagtgatttccataaggaccgttctgaataaggtcaaaaagcttctcggaaacaagttggaaagcggtcgtgatagcggccctgggacatgggttatggaatgcgcttggagagatttctacaatcatgtgggtttcgttattcgccgataagttggcaatatggctgcgctaaagtatcgttcgacggtaaaggtgctcgcagcgttcccccgagtcagtatgggacgcccatttcaggagaagtttgccgaggtacaatgggaggtggacgaggacaagctcaacgcgtggaaggatggacggacagggttcccggtcgtcgatgctgcgatgaggcagtgcaagtacatgggatggatgcacagtaggcttacaaattgtgcagtgatggtctgaactggaactggcactaacatttatctgaactctgcgctagatcgccctcgcatgatttgcgcgtcattcctggtcagtggatacgggatgcttgtccagatcccgcacctgatttccaatgatcatattctcgtgaaataggtcaaagacttgatgatcgattggcacttgggagaacagtattttatgcagcagttcatggcaagtcgtcgaaactcagccacgacactcttaggctaatcgtttccttcgagcaggatggagatctcgccgccaacaatggtggttggcaatggacagcatcgaccggtaccgaccctcaacccgcgtttaggatattcaatccgacttctcaatcagagaccgctagtccggatggagcctacatccgctactgggttccagagctagctagcgtgtcagataaaggcgagttctcctgcgcaccgcttgactgcgcttggtactgatcagaaagatttccgtacagccgttcataatccccatgagaagctatcaccgagagagtttgcaaagctcaattatcccgctccgatcgttgaccatgcaaaagcaagaaagagagcactggcgcggtacaagaatccggggtatgggggagagggctcggactagcgaggactcaagcgttgaattcttccttgtccgattggccttatgaagcgcatgtctagttactcactcccctcgctcgcgaacagttgtcgttgcgtattttcatcttataatatcgtatatccccaaagagatcaccgccgcattcctggcgcgaaatgacgtcgcttctatgtgcccaatcgcggccgcatttgtcctgcaaccgcataagtcccacatcggtaacactgcgttcgatcgaagacatatgcttcaatggccgcggcaacctcgtcacgtggtcccgtggtcccgctcgtccgccagccctggctgaattgcgaatgaagtgttgcgcctcctgttttttttcgataccttcagccatcgattccaggattgttcgattgcaaccctcgcagcgttaagttcacgtgcagggttttattgtctttgacacagctcaacttcggctagcaggcagtaacgcgatcacgatgaggcggcttatcaccctgtgatacaacacttatgacgaaagaatgccgctgatttttccgccctctttgcgaagtcatgcactcggatacctcagataagtcactgagtgggaagctgacgtggatcggattacgacaatgatatgcgaaggctcttcctcacagatctctaaatgggcctgggaggcggtttactacctcacaagagtcaccctagactgattcgacgaattgagctgctggaaaatgctcgagttctcgcacaaaactgccagtgccactcaaaacgcgacgtcaaacacatcctgagggaccggtgaaacccgcctgttcggctcttgaatgccgagatgatcacgtgactggacccgcgatcgagcggtaactagcaaaagttggtggtcatgagaacctctaacttcggtcgtcatagccacggtcctggatcactcaacatccggcaaagcatcactcgatcatctcaagtacagacagcgactgtccccagtacaagacttgctgtaggaagaaactttatcaaaaggagatccgacccctctcgccagcagcgcaacggattgactttgcctcgcgggttctcgatcgtttctaggtcgtgcgacacgccttcgttggccaggaagattcccaaatcgagcctccctataatgcttcgaacaatcgtcaaatctagacgatctatccgaccgagctctgctctcgctgctcagcgatggtacgcgacccctacttcgtctcggttacgaccggcagaggctctcgccactcgcgatgacgactattctccagatatctcttacgcctcgaacgaggcgggatcgatcgatcgctcctacccatacatgctgaacacctcacgacatacgaactaccgagctctcacgcccttcgaccaggagaagctcaccgtacttccatcacccctccccgacgatcaaccaatttcagaagcacaggcagccttatacccttcgacatccctgctcgactcgctctccctgattcatatctgcctaggtcgccaagatacgataccgcgggcattcgatatcttttggacgttactggatgaccacgctgcccatcgcacgagtttaccggacgcgaacgtctgggcgagcgtgatagaagggattctctcattagacgcaccgaagcaagcggggggacggtcggttgcaggaaaatccgcttggatgccgaaggctgaagcgctcatcgccgagtgggagaagttcaacggaggccgctcagaaccaggcacctctagggttcgacctcttggattaggtcgcggcggcgagaaggtctatgctagctacctcagggggcttgtcacatcggggctatcagtctctccgatcctgccgtatctgcattcccgaagcttaagcctgacaagcatgatgggcacgtggagccaagaggaaaaggtcatgactttggaagccttgcgagtagctgccgaggccgaggacgatactgttgcgctcaaagccgtgaatgtcacgagcgggatggagcaagaccgtagagagaggttgggaaaaggaatgcccgtcgaggtcaacccactgcctgccgtaagctcgttttggtcaaggtcatgtgtatcgagagcttagatatttaatatccgtcacttcgcagaaagaaccttacaccacaacactgatgcgacagatcggcacgcaatccgcggacccagacgctgttctcccccgtttcgctatcgctaatctgcgagccaccttcaaagacattccgccagaggaacttccgctcagacgtcaagagatgctcgaatctgcttcgctacaagccgccagagctgaaatcgagaacgcggcgcaaaccctcgaggcgcaaggcttgaaggacgttgctgattctcaacgattgcaatcgggaaaactccaagcttggatgtggcaatggagccttgacttgacaaagcgtctgacggacgatattgaagccttggaaaagaagacgactactaagggtgcaaacaaaagccgggccagccttgcccaagacacggatctcctgttatatctccgcttgttgtctcctgagaagatggctctggtcactatcctcgaggtcatgcgttcgagcgggtctggtggcatacctgacggtctcaaaactcttcggggacttgttcaggttggcaaagctgtcgagaccgagtacagagctttgacaatacagaacatgctcgggaaggatagccaaagcgtacttggtgttgcggagaacactcaagatggtcaacgagcggtgaaccggctttggcgcaaagtcggcaagcaggcccagtcggaggggttggggcccacggacacgaaagatgccgaggactccgcagacgctgctcgtgtcgccagactggatcacagccaggctttggacgcactgcgacgcgcctggacgcccgactggacgcaagccaagcacgttgccgtcggagcctttctcatgaatgccctggtggatactgctaaaatctcccggacagcgatcgatgaagaaggagtggagcagtgagtcacatgtcatggcgaccgctatgactgcagctgatctcgatatgttctgctagctccgaaatccagcccgccttctcccactcgtatgaatacgttcgaggaaacaagcttggagtgataaaattgaaccctgctgtcgcttcgaggatggcaaaggacagaatcgccatcgtcgtacatcccaagcatatgcctatgctagtacctccacgtccctggaaggcgcacgatgacggagcgtatctcttccacaaaggtaagtcaaggctggttccgtcgatttcgctcgatcgatacaggaaggctgaccctacgagaacacggtgcagtgtctgttatgagattcaaagagagtgctgaacagggaagctatctccgtgcggcgtccgatgctggtcgtctcgattctgtctttgccggcctcgacgttttgtctagcaccccttggagagtgaatcgcaacgtcttcgatgtcgtgctggaagcttggaacaggggcgaagcaatcgcagacctgcccgcttcggaagagaaaacgcactatgaacaacctgaaaaaccaagccctgatgatgcggatcccgcttcacggtcgctttatgtcgcgaagatgcgagacgtacaaggccaaatgagaaaggatcattccgaacgctgcaaattcaactacaacctggagctggccagatcattccttaacgacgtgttctacatcccacacaatctggacttccgtggtcgagcataccccgttcccccccatcttaacccggtaggggacgacttgtgtcgaggtctgctcctctttggcgccaagaaacccctcggcgagcggggtctgatgtggctcaggatccacctcgcgaatttgtacggattcgacaaggcgaggtttaaggaccgtgaacagttcgccattgacaatgaaaaggagatcttcgatagtgcagagaatcctcttggaggcaatcggtggtggctcaaggcagaagaaccctggcaatgtctagcggcgtgcttcgaattgactgccgcattgaaatccggaaatccacaggagtatttgtcgtctcttcccgtgcatcaagacggaacgtgtaacggtatgcagcactacgctgcgctcggaggcgacgtccagggagccaaagctgtcaaccttgtcggcggggatcgccctgcagacgtctatacgcgtatcgccgatctcgtcaacgagattgtcaatcaggacgcagccagcgggaaggcatttgcccagatcgcccaaggcaagatcacccgaaaggtcgtcaagcagactgtaatgacgacggtgtatggagtgaccttcatcggtgccaaggaacagatcgccaagcaactggtatccaagggcgagattccacgagagtacatctaccacgtctcgggatacatcgcctcaaccgtactggcctgcatcggcgatctgttctcgggagccaaggcgatccaggactggttgaccatgtctgcacgattaatctgcaagagtgtacccctcgatcgcgcacctgcagtggtcagtccgctcaccaaggcggtttccgcaactagtcaagtaccggtacttgacaagctgggcaaacccctcagcaggttgagcaaggaatccatgacgagtgtcgtctggacgtcgcctctgggattgcctgtcgttcagccgtaccgcaagactgccaggagacaggtgagccaagcctcgggaggttattttgcgaaccagcctttattgacccacacttgttctcttttacgtccaggtcctaactacgctgcagacggtttatatctcggatcccaacgctgtttcagaggtcgccgctggcaaacaagcctcggcgatgcctcctaactttatccattcactggatgctacgcacatgctcatgtgcgctgcgcgatgtcgcgatgacgacgtgacattcgccagtgtgcatgactcttactggagtcacgcatccagtatcgatcagttgagcaagaacatcagagaaacgttcatcgaattgcattcgcgggatatcatcggggacgtgcgcaaggaggtgagtcttcatttcctcagtattcgaaatgatcatccggcgcttatcgtgttctctcgactcgttcagttcctggagcgatacaaggatcacgtcctccccgtcaaatcagctcgagatgtttatctggccgtccgacgaaagaagccctctgccaaagccgagcccgaagctgaagtcgcagaggtcgaagatgtcgccgaagatgcggaggggcaagaggcctcggttgccaagcgcagcactcgcgggacggcgttcgtcaactttgaaggcgaatccaaggagaagatcgagattggcacgagacaattcgttcgcttcactgacagtctacctctaacgccaacaaagggaacgttcgatgtcaacaacattagggaaagcccctatttcttctcctagatattgaatatcacaccactcgcttgacgacaacatctatctatctacgtgtattttttctcccagaaggagcggttgtatcgagagattgtaattcatctgcttgcttgtactcgtgcgctttctgcatcacatctacaacactatgcgcatctcggagaccatcgtcggatgcagagcgaccgagaccacaggctgaagtgtcctatcgattcctccatactacgacgtgtacccaccatgctgcacttctgaacaaaagaggttcacgtccttgtaacggcgtgacgtcattttctcgtcatcttcggcgaccaacgtctcgacgcgtttcggtgagcggtacctcccaaatgggacaatcagcgacgagagggggggaggagggggagacggatgactgctcgtacggaactcgtctcttccttgatgccactctgattgccgatgaaactggaaattgtgcatccagcgaggacaaagggcaagtcagcaggacatcagctacgacatcgtgcaatctgatctgaagtactcgcaaagcttgggtccagtgacacacgacgcgttcatcaacctcttcatcaaccttgatatcatccagacttcaagcatcattagcagcatcaaagctcaatcaaccgacctatcgtcaactccatccacttcaagtctcgtaataacagatcgttcaaatcgccatggcacccgcacaacaagcgttcgcagggagcctttccggcaagaacaaagccgaattggtcgacgtacgcgttcatttataaatacaccgtacctgctctggctgacttacggtctcctttgtggaactttgcagattctgaaagccttggagcaagacacccaaggactcaaggccgaactcgaggatagactcgagcattacctgcaagataacgagggtaccttgcgtgatgacaaccgattcaagggcctttatgtggccaggcgtaaacgcaggtcgtaagtctcgccacacaccacgccgtgaccaattccttgaactctaccctccaatcgtacagtcctcgagacgaatcttccacccctagcgttagggagacggccgctgccgaggacctagaagctctcaagaacgccacgggtaatctcgcaggcaaagcgtacgacgcagctgccgctacgtacgaccagaacgttaggcccacgcttaacagcgctctcgaggagggtcaagagatggcttcgcgaggtgccaggcgtgtttacaagaaggtcaaggaggccaccgggatcgacgaagactcgttgcgtatcccagagtcgcccacgtgagtccgaccagattaagaggacagaccgcgaactatagctaacgttcggcacgacgtcgccattcagtcgagctcttcgatctcaagcgaaccagtccctcgagaacgccaggcctgtcgttgagaacggcgtagagaaagccagtcgagcggccgaacatgcgcgcaaggttaccgtccgatactggagggagaacggcaaccgggagttcaggcaggccgtcagggatgtacaagaggtgagcagaccgctcatgtataccgctacacatcgtttcgccgacgaatcgttcttggttcccccaattgcagcacctctccaagcctgacaacctgatcaagaccatgctctttttcgagatggtctacctgttgtggtgtctagtcccttggcacaggcacgaattccagttccccccctcgaagttctcgttccacttctgggacaggttcctttacgccatgttttggtggatgcccgagatcaagcagggatactatctccccgagctcttcgtcatgttgcgacccgccagcaacgccggcattggtttcggcatgtggtacgtagatagagggacgcgcccgccgtgatattcgctgatgtgtttattcgacgtcgcgcctaggctcgtctacactgtcatcccgcctttccttctgagccacctcatctccttcttgcctcagccggccgttaaagctcgaagcactcgaagctcttccaagacccgtaggtcttacggataggtgttttccatcgctcatcatgctgaaggcgattcctttgcgcctgtgccaggtcaagctgtggctcctcttcccgcctgggaccctcttgtcttttgcctgattcgtctggctctcgtggtgttccccatcacttcggctgcacccgactttttcaggtaccagctcgaggctatcggcaacctcagcggaagggccctggttaccgccttgactggaggatttgtcctcgcgcacaggctcgccgccctcgccgagtgaagctcgtcttcttgtcgtgtgcacaacggggatgctccctctaccctcataaagcgcccatcgccgcagagtcgtcctgcatcgctctagcgaatcgcgaccgcatcattttgatttcttttgaccgtctttgcctggatcgaccgcaaattgtaaaatgacttggcttccactattcgtataataatcacatttcgcttgaagattgcccagtggacagtcgtaacattacaacctcaccaaacgctctttcccctgcctctgcctctgccccggcctccagtagccgcggtcattctactcttcgttccaacagtcgccggcatcctgtcagtagcaggaggtacaacggctgtacccgtcgtatgtaacgcgtttcgtatcgctaaagcggcttcgtgtttctgagattccgtcttgtcgagtaagatgcgcccgtcttccacggggaccggtgatgccgaccgcattttcttgctgggctcgtcggtttcagatggcggcttcctcttcgctcgaacgaaagactgcggagggctagcaggcggcgacgagggtatggtctggacatctgtcggctccaattggccttgcgagtcatccatctggtctggtgtgtctggtatctcgtcttgcggtggaccttgagtgcgaaccgcggcgatccgagctctctttgccagggtcctttctctcgctcgttcgaacagtcggttcgcttcttcatcatcactctcaggctccgtcatctctgaattccaatccacgctggatgatgaagcagcgttttcctcctcgttgacactgtgagccacgcgctgagacggtgaagttaagaaggatctcatttccaactcggcactcattttagcttgaactggcgacaggtccagtgtcggcaagtgggcttcgcgtcgaaattgtggagagtccggagggggagtttcgctttcccccaatgggagctctttcgctggtggtctggcaacaggactgaacgcttccgtcggataggtttccatgatacgttctgtgtgacatcgttgctgtaagaattcatagctcatctccgagcaagcctcttggcttcgacgtaccaggcacaggcgagccttgtttgatttgattccaccttgaaacactggtttgcaggaccggtttgttgagcgtatttttcaacagtggatgcagtctgcgcgctgcggtggtcgctgatgtgtcaatggcctgatgatcatgaacttcgatgacgtcttgtatggaagatcgctcaggcaatgcaagggctcactgtctgcagatcgacagtaccagtggcagcctcactcagacggtcgataaagcatcccgagagcgccatcagagggtgaatgacgtgatcgcggatcacagtcagagcctcagagtcgtgcatcttgctggtcggagacataggaatgagcgaacaggagtctcccaccaggatagatttggcgccggacctacttgaacttgatgttccagtcaaagttgtcagacgagatgtcaagcatgaggtcctgatcatacgacagcataccaacaaccagcgaaatcagtgtaagcatccggccggtgagatctcacccactcacgtaaaaagaatcctcctctcctatatcgagatccacgtcgtcccaaggttctccggggctaaacaagccttccagactggctacgcaattttgcaccgcagcatcccggctctggctatctgcactagcattctggctataagaagccttcctcgtattttgactgtagctatacgagtcgccctcgagctgggtgagtttccccgatgctgacgcccgcgagaggagccgtgaaggtgaaaggacctctacatagaccttgtcgagcgttgttgccatgaatatcgcatcgtcttcgaagaagacaaatttctgcagatgtcgttcaatcatcataaggctgatgtcacaacaaggagatactcaagtacttacaagcatgaacagccgatttgctacagtcttagctagccatggcctggtcctcagtgccaaatcctgattctgacagctcattaagattatgtcagtcgctcagccttctgcgaaccggccacaacgatctaaccgtgctcagatccgtcatgacatcacggcttttctgtgtaaaccggttgaaaaggctacagattcataggcgtagcgttggtgctggtgactcgctcaagactaaccgcaaatggttccctcttcaaacagaggctgccggagccgctgccgaagtcagtttcggaagcatattcgaaacagatttacccccgaagatcatcggtcgacctcgatcgaagtaatctcgatgagccatcagagccaggtcagatagcagacggcacactttcacccggtcgttatacttcaatagacagacgctatgcaagatatcgaactcctcaatcagacgggcttgccgctgagcatagatagtcccacggactctggtccatccatctttacccggacttccacggcatatatcaccgaccaggataggttggaccaagtagtcagggtcacgataccttcatctcagagacgtatatcccggcaggatccgagatggcaagcagtatcgctcgaaatctgttccgaccgatcttcgattcgcacggacaaagtcccgctcttagacaaggtggtcgagacgacagccggaatacagtatgagccccgatacaaggcattttggaagcgggtcagcaagcttaggaactagacaaccatttcccttactaaatagccgaatccttactttttcttcttcaacccggtaggctaggcgagccggagatcctgatacgctgctcgtcttacctcgagtcgacctggcaaggcatctttcggggatgcccgatcgaacatcgatagccgatttgctattgcccggcacccacgatagtgtggccttttacggatgtgagtctggtcgcgaaacactagcagtcccatcaaagtactcacgccctttccaaacgtgtctgtggctggatagggccgttcacccaatgccaagagattggatgcacgctcaccactcagctcaacgaaggcgtccgattctttgacatccggctcaagctcaagaagggcatcttgctagccttccatggattctggcctcagttgacgacgttccaaacgatggtctccgagatctctcaatttctgctcgagaatccaagagaaactctggtcgtatgtatccagcaagagacctcgctgcatcccgatttcagtcggacggtaagggcagacatgcaagcgacgattgacgctggtcgttggttcctgcaacctcgtgtacctacgcttggcgaggttcgtggaaaggcgatcttgatgagcaggtttgggggagggtcggggccggacgggtcgatgccgtgggaggtccctgtggatatcggccaaaccgaggtgcagatggggtggagaccgaatcgctggccgaattcgttgatagacggattcatctgggactgcggcgcgaccgaagtgcgcacacaagattggtgagttggcttctgacatcctgatgaccggtggcgctgagccaggaatactctaccgcttgcaatcattaggtacgagatacatggcgtcttcaatattcccgccaaatcgagcgtcgtaagcgggagatccaatcttggatttggccgcgaggctgattccccacatgtttcttctcgcagctcacggatcatctgttgtccggtagtcagttgccttcgttttccaacctgacactgtccttctcttccgccggatccatcccgtttgccctcccctcctttgtcgccaagggtttcgggtggccaaactggggcctcggctttcgcggcgtcaacgagctcttgcgagactggttgctcgatcggttgcaagcaaaggcccgaggctctagctccgaggcgagtccggcgggccagagggagagaatcagaggcatcgtaccgatggattattaccgtacattcggaatcgtggacgtcatgctagcctataacacggttggcgtagagagcgggttgtacctaacgacgtcgaaagggtcatgaccttgagcgatgattgcctttctccgtgccgatcaaaagaacgatccaccttttcgcttaagataggggttcctttgtcgatcgttatttttagcatttgttcgggcgaatcaaaacagaacgagctcctttgttacgtttcacttgttctttgcaggaaacgtgagcgagagcgacatcagctgatgtaaacgattacgtcggaaaagggcgaagaactttaatctcctccctctgcgcaacttggacacatgggaaggctgacagtgtcggatgacgatggaatgcacagcgcgttacatctcttcgctcacgtttggaggacttctcatccactcatcagctggcagctggacagctggtgatgttcttccctgaacgaccatattcagcccataccaggttcaacaccgtcggccattgagctcgggcctttcatagcggactcaccccggtcatcatcagcctccgccccggctgacgagacctgagctgcgttccccaacgcacgcacgcgatcttgcgaccgactttgtcaacaacaacaaacgagacctcctttacttctcgctcgtctctgggtcgccaggtaccgaccgcatgaacaagtgcgaggtggcttgcaaacttccggtccatacacacggttcctttcaataatagcatcctcttgcccctctgctcgtcagcctgtgccttcggccggtcgaaagcgcacgtttggcaagacccatagcctccaggctccaggtgtagtccgagtgggtggtcgagtggccggaagattactgtgatccttccccaaccccggactatcgagcgtggaggatccaattcgagggtgagtgcccctcgatttctcgaagattatgagagaggccgatgtccatgcacgagaccatcgtgttgcatgttgtgaccatgcgagatgttggtcgagatgcagagtaggtaaaagttcaaggatatgcatattgattcgactcgtacccctcctgtttggcggtctaacaagccggtacagctacgtactggagttccagacgacagccggatccgacatacctcggaaacgaagacgcggtagcgttatctacaggctacctggagtcgacttgcgatagacgtttcgaaaatgatccacgaagagtggtcagactcaagacacggcagacaacagcagtttcagacccaggagcatcaacaacatttgacctcgagcgctgatcgacactctcgtcggcgatccgtccctgtccagcttgatcatctcgacgacccactcgcgaccggtggatcgaacggatcgtccatccgagatcgcagacgaagggaagccggacaaaggaccaagatcgagcaagtcttctttccgccctttgaagaggcgtcgaggtttgcttcaaccgcgggatcggcatcggcggctgggatgatcgtcgatggcgaagaagtatcctgggcgaacctgttgtcccccgaaaaggccatctcggccgaaccagatcgatccgttcgcccagttacggcttcgagagtacttaatcatcgtcggacccagtcatccaccgatattgccacctcgagtcgtacaccactgcgcccgagtggtttcagcttgaacaagatggagccgacgcgtgtttccgcatcgattccgaaccggaatcgctcacccccttcaagaccgcggacggtggtcaactcgatctcgccgttgaccaagagcgcgaggaggatgttgggagatagcgatgagaacgggctagcatcccctaccgaggaatgttccggaggtcgaggtctactcgaagccatcaggttggatagcctgtacaggtcagctaggggagaaggatccgttcgaacgtctcaagaggaacccaaggtgagagtgcctctcgcccgtaccgtcactcaccccgtcgagcgtcactaatcacacctcgacgtcctcgtcgatttcagccacttcgacgttccaacactttgccactcgggcgcaacaagagaaaggcgctgtcggtcgacatgagcagggggctgagtagcaacaaacgtttccccgccacggtgccacctcgcgcattgtcgcatctgccagagatcatggtcgtcgaaccgccacgacctcgtcatcgaccacctccgctacgcaatttaccaccgccctcgtggtcttcgcccggtccctcaccaccgttgacttcgttggcgacacccttttcgaccgacatgttcgtcatgccctatcccaacccagtggcaaccatgacgcccggtctcctctcgcccaattatacgccgccccactctccacgtcgactgggccattgccatagcgtgcccatcacacctcggagtgacccgatggaacagctctacccccctgatcaactccctgcgctggctcttccgcctccacctatgcgggatcgagcgaggaggcgatcgagtttgactagtttcgagagcacgaccgagacgattcgaccttggcacatggtccaattgacccccaagccgagtcgagcgcagttgactatggacgacaagaagcgtgacgatggtgacaagacgggttcgcgtaaatcccgacctgcctcgacggaacccgtcattgtcggcgcgggatcacggaccgatggttggcggtaccccaccgtcatggacgacggactcgctagggatgctcctcccggtctgagtctcgagacgctcgtctgtgattgggatttcgattccgacgacgatcgggatagaggtcgaccggcccgttcgcaagaatccatctcccggagaagacgactccgactgaccgccaagctgcgtgccgaggccaaggcggcgagagagtcgatcgagcggtctagcggtgtgggaggttcgccagggaggatccgaacgtagtcgatataataatccggtcgtgttcatcgtcgtcgtacaagcgtcaagtcgagcgtacaaataaagatgattacatggcacccgatgttccccatatagatgataccgagtcgtcaggcgaggagattctatgcagatagctgtctctgatcgttgtgcctcgagggctgggagtcgttattcgagtttttccaggtaatccagtcgatcctacacagaggaggcgtaccgtccgatcagttcccgggatcgacagaaggggtttatccgatcccggaaagagactcacgaggacgacgttcttgctcgtctcttcgatctcacccgcgaggaacacttcatccaggatcgcatacacctgcccacacccccggcgaatcagctctcatcctgaacacaaattctcgcatttctttctctcgccatgccatgccataccattccaagtgatgccacggggatacgacgtgccgaccgagactcaccttgtaaaacgagaagaccaaatccaactcgcacacgttctggaaaaaggcgtctaggacctctacgaacaggtgaatcgcttccaggtatccgagctcgttgtcgttgttgtccacgcaaagacagaagaagagaccggcgtaccggcggtagatgatcttgtcattacggaactgtccacatgatggggtcggcacgggagcgaggtccgcggggggtgggatagggaggggataacgggaggagggtggtcgatatgggagctccgatctttgtcaaagcagggacgttgttccaggatgaagctcatcagcctgatatgcctgtcgatcaaggtcagtccgggggtgctcttgccgctccatatcgtgatggcagcgcaaaagtttactgatcgtgctgtcctcttcgacagtcgagcctgctatggaagaccccgttgggcgtatcaccgcatctgggacgaaatccaagttcaaatccccccttcgagcagagtccgagctccgggatatggatcacgtcgacaacctcgtccgaacgcccaaccacctcgcttcgatctcggacatcgacgaatcggcaggtgcggggtcgacgatcagtgagagtgatactggggtgagcgagagggaggacgaagagttgagggagagtttcgatcgggtcaagattcagcctgaagtggctgtacgtgaaatcgggcagccggggttggcaatagagatgacggtaactgaggaggtgggggacgtgagggagacgatacagacgagcgagatgatcgaggagactgtcgtcatcgatatcgacgaggacgaggacgaggacgaggacgaggacgaggacgaggacgaggacgagacgatcggtcggatcgtcatcagcgataccatcatcaccgagaccgagaccgagaccgagctcgatctcgaccccgacgcccccacactcgatatttcgggtgccgaggatattgccgaagagcccgcgttctacctcgacgtcaacccttctatggagacggatgaacccgcacagacgtttttgttcgaccgggtcacctcggcgcctatcggggaacccgcatcgtcctccgaggaagaggaagaagagatcgtgctcgtcccccggaaacacgtccaaccggaacccatccaactgcccgaggaacccgagtacgttcgtgccaaggatggcgatctcaagcccaaggagagcttgatcgacaaattcggaggcaagaagcccgcgggcaaggacggacggccggtagcgacgacgagcctgcccgggaagaatgctcgatcccggactgatgccaacgacgatgatcacgccgacgaggagatcaccaccgcctccaagggtcagaagaagaacaagaaacaggccaagcgggagaagcgaaagaacaagaaggaggagaggatgaaaaagaccgaagggatcgtccggcacaaggtaccccgtctggacagtgacgtcgaatggggtagcgacggtccacctagaggcgcatccaacgagctcgtcacggatgaagaggacgacgcaatcttgcgcgccggcgctactcgtgacatgatcggtgggttgaacacaaagggtctcaccggagccaagaagcgagagatggagctcttgatggattacctcgagaacaccgtcggtactgaggagcccgatagcgacgacgaggtggaggaggacgaagatgcggtgcccgggatcggtggtggtctgacagctagctcgatggcggcattcgtcaagggcatgtccgggaccaaccaggtcacgatcgacgagatcaacgatgctcgaatgctcgaagaggaggacgaggatgaggacggctgggagagttcgtccggtagcgagttgaccgacgaggacgaggacgctcagcccgtggcgtccggatcgaccaacaagaaatccaagtccaagctggtcgaagtcgcgcctggtctcctgagacaggtcgatgacgggatggacgacagtctcggggaggacgagtcagacgacaccagcgatgacgaggatgacacggccgagatggccgggatgggctttggctgggctgtccccgcgtcgagcgacagcgattccgataccgactcgaacgaggacaagggagacggggacgagatcgaccagatctttagcgggaaaaagacgtgggccgacgcaaccgacgactttattgccgcgatggacgagctcgtcgatgacaacgacctggtcatgggttcgggtaaaaagtttgaaaagcacaagctcttcaacgccatccagaacggtgactttggcgatggctgggcaacgagtgagtccgagtccagcaatgtcatgtaaggattgcactaacgcgtttctctatccgcgtggcacagaacccgcacccaaaggcaagaagaacaagctcaagggggtacccaaggaattgcaaaaccaatgggaagccgaccgcctgaaaaaggccgaaaagaagcgtcaacgtgaactcgagcgagtcgagcagcagatgagcctttaccctgcgatgcgaaagcaaggcaagagcaaggggaagcgcaaggaaatctacgctatcgatcacaccgctgggctctcggcgaggcagatggcagccatgttcgatatcgacaccgactcggacgacgactttggcggcggcggctttggccgaggaggcggcaagaagcgacaagccggtcgaccacccgtcaccgatcttcattcgctcaacgaggaaattcgcgtattcatgcgtgatctgggcaagaccaccatgaccctcccagctatggacaaggtcagccgtaaaaaggtacacgaaatggccgagtgctactctttgaagtcgcagagcaagggcaagggcaaagccaggttcccaattctcatcaagacgtctcgctcgagtctcgagatggtcagcgtacgttccgatcgcaagctgcaggggatcctcggcggcggtcgatcgagcggtggcgactttttcaaatcgaagtacggtaaaaaggaaaagaccacattgccaggatcgacggcaaggagtggggccggtacgcaacgtcacaaggacggtgatgccgtcggcggaggagcctcagccattggccaggacaatatcggtcacaggctgcttagcaagatggggtggatcgaaggcgaccgtatcggtagatccggcggcctggacgttccgtaagttgcctcggcggtcggttggtcaagtcgagatgttgacacgtgtctcctccagcatcgtcgctatcgtcaaaaacaccaagttgggtctcggagcatagaaacagaatgaacgtagacgacagtcatctctcacacatttcgatctttacgacaaatttttcggctgtattgcatagctcgagactttcttaaattgacgatcctctattgggcatcttgtacagtattacaatacgatacgatatacacagtcggacgaatagcgcaggtccgtctgtagaagagaaagatacaatagtcaaggttcatctagtgatagtccatgagatctgcgccattcggtggctgcttctgatctactcgtccccgtgggtctggctttcgcgttacggtagccttctgtgtggtcgcatcagggaacctgattccactgcctgttggaaagggctggcgcggagatgagatcatctcaggactgcccgcttcgctgggttgagcaggtcgcgaaggtcgcatagtttggatggtcgccgcgcttgacggtccgagcggtcggttcgagccgtcttgccgcctcgaggcatgttgattggaaaaggggttgtctgaaagtttcctgtgcgaatccggcatatccaaagctttgggtggcgagcgagggccatttccggatccgataccaggggtaacgttgatcgtgtttgtagttcgtgtttggacgggagcgacggcgggacggatcctcgtatcggtcttgtgaagcaccgccgtgcctagcaatcccgaatcggtcctcgcgatgcccattctcctgatcgcgtctgtactgagtgttccgatgccacccatttcatctgcatccttctcccctgcctcttcgtcgactacgccccaggcgagattctgacgacgcttcgcctcctccttcttgtctttttgcctttgagaaggtctggattgcagtccgctgggtgcggcaggggtcagattgcccgcttgcgtttgccggtgtgcccgttttcggttgcgggactggcgccaaaggtagaggatcccacccatgaagatgatgctcaccccaagtaggactgggtggggatgacgagtttcagctggcttcttatacttcaagatcacttcgaaaaacgtactgaatcctacgatcttcaaagcggtgatgaccgtctcgctcgccatgtcggaatctgtctatgtctctttgtccgattcttctgagactgactccctcaaggatacagtatggtagacgagatgatgcgtcgaatgtagggtcggccggccgaaggagtgtgtgaatagatctcttatctggaggcgatgattcgatcacgcagctagaagatgaacaagcgagcgtgttgtatatgtactggaagtgactctggctgcgtagcgcgatatgctcttggaagattcgctcgagtactgctgattaggcttatgcaaaccagctggcgaattccaaggcttaaaagtgtgggtatagcgaaaacgcctagccttttccggaatccccttgtcttgggttatatcctccattctttccgaggggatgacagacccgggatttctcctgctaccacaaaggatagtccgcgattcacgttcccctcgcggatctcggtttcaatgcgaattctaccgccagaacgggtgctgtagatcgaggagataccgaaaccatccttcgaggtgcttcatcgatccgaggctagtcatgttgatcgcccagacccagcgagactactgcgcgtttcagttttgctcggcgattcttggcagccaaactgctcccgtgattccaccttgtgactgtaccgggccaaactgactatcaaagtttttggggtccagtcgttagatgcaaagaggctcggctatcatgagctctgctcgtctccaacatcgccaatgtcgcgagtctattcaggggtcgtaccttcaaaggcggtacggctccagtgaaaggggtttcggcgtacacaatgggaaagctttgtcttgctaaacatgaaccgaaactctggtactctggacggatatgaccatgctcaacttccctgctaccgtacctgggtgatatcggtctaattttcaagacactcaaccatgaccgaacgccgccttcacatgtcaggaagactcgatccggccatatagtgccgaggaagatgccgagaaagagaattccgcatttcttggcgccgcgggcgttccagcgcgtaaaaatccgacatgctgcgaccacaaacaatggctatacagagtttcaatcttcatcatctcgatgttggccctggtttttgtcgtacgagttaggtagacgagtgcatgcgggcggtggttcaaaggaggggcggaatgcaacgtcgcttgacccgcaaatgcaagaagcgctacgagatggcttggcttcggttcgtacgcctccggacacgccggatacgcggcaactgcccgacccagctatgatctggagagagacgagtcaagagactctgaggaagcctcttgcgcatgattttcctgacgatcactactcaaggctatacaaaaccccaagtcaggaagaagaagcggagccgaagcctgatactatgccggaagacgcatacgagcgacgttggaagagcctagactggttcgatgccaaccgagactcgacaggctcagacctgccgcgcattcaagctgaagcaagcgcattcgaagagtcatcatcgcagaagagcgtccgcctgggccgaaaggaggccgtgaaaagagctttcattcacgcttggcaaggatacaaagatcatgcctggggtgagtttgtcgcagcttacagcgtgttgtttgacgaatgactgaagcgtggcaatggatcacgacgaagtgcgacctgtttcaaagagcgcctctgaccctttcgctggatggggtgcgacgatcatagactcgcttgagactttgttggtgatgggcctggaagacgaatacaacgagtgtcgagaacatgtcaatcgcttggatttccgcttggtagaaggcaaagattgggcgtacggctatcgtccttccccgacgaccgtcggcaatgagtccatccctgcgtatttacggcgtcctcatgaagcaggacgagccatggacatcaaactgcgcgtattcgagacgcatatcaggtacctggggggtcttttaggggcatacgatctttctggcgatcgtcttttgctcgagcgggcgatcgagctgggagaaattctcggtcaagcctataagacgcagacctcagttccggtcggattgctagatcctggacagtacgtcgtcgcatcctctagcatgagcgccgtacagcgccttggaagctgatcaggcgtaccgttctagtgaccagacttggtacaggtccacggcggctctgacggcagaaatggggtccaacatcctcgaatttacacgtctatcacaagtcacaggcaataagagttacttcgacattggtcagcgaacgacggattggcttcaagagaatgctgtcaacaagacgcgatatcctcctttgctgccaatcgctttcaacagcgatattcaagagccgatcccgctatctgccacctacactatgggcggtatgggtaagtcctatggcgttgctaagatcgagcctcacctcgctcagttcagagcactttctagtcgatagctatcacgaatacatgaccaaagagcaccttctcgtaggcggagtaagcgaccagtactcgaaaatgtatacagcagcaatagagactgctcgaaataacctgttcatgcccttgaatggttacgagggaagagaatatttggtaagtcgtagctcatgctttggcctggtcgagacgctgacgaactttccagacaatcggagatatcacggacggcagtcgtgagtgtggagcaggtgaatgcgtcttcaaatcgactgactagcgttaaacagaaatgcaccagctgcaacatttagtcagtattactcattccagatttagaaacccgggtgaggaggacaagggatctgaccttgaccgaggtgtctatgctacagacttgctttgcgggggcaatgctgggcttgggcgggaaattgttgaacagaacactcgacatgtaagccacactaccttgcgtctattgaagtgaaattcaagtcgaaggtgatgatatgactgcacagtgacgatggtatacgagtaacccagacgtgttacatgatggtacagaaacagcacgatagcgcggaaggaatgtgctcacctctctgcgttttgatagggcgccatgaccgaaagcggactccagccggagatcatcaatttccatcccctgaaaagtcaagctcatacgacagggtcgaggtagagcttccgaggagaacagattatggaggatcccgctggttggtgcaagagaagctcaagggaagtcctgcgggggctagcgcgcaggcaccgcaatatcaaggtagaccagagacgatcgagtcggtcttttatatgtaagtgacattctgggtcctgcgtagatggcacaagctagatgatcgtgtccacaggtaccgtctgaccggcgataaagcgtggcaggtaagcgggtgaactcgccccgcaaaggcagaaaaactgaccgatccgtgtttcataggatcgaggatggcgaatgttcacctcatgggtggacaagtgcaaggcagaagctggtttctccgaagctccagacaccaggaagatacagcccgatctgtcggacaagatggtaagtgaaagcttggtgtgtgagggcaccaacccatctgaataagcctggtcacgtgcaggaatcttttgttttagctgcgacgttgaaggtaagcgggtgatgagatgtagggtccagtgaaacgagcaagcatcatcatctgcctttgaatactgatctcttcttgcagcaatactacctgctattttccgagtctcacctcttatcactagacgaatacgtgttcaatacgggcgagtctgcttgattacaatgtgttgacacccctccatctactgaaatttccttgcttcaaatgctacagaagcgcatccgttcttactgcacaatcggccccctggaagcgggagattctggaccaaaaaggaggatcaacacctcggtgtgagagctgcagggaccgatgcccagctatggatgcgatacgagcttatgacgaggaacgattcccggagctgaaggtttccatcagcgagacgcatcctctcaatcaggcgcttgcttgtctgctatcgtgctatcatcactgccttataaagttatcattcgaggttgatttgccgagatatatggtttcaagaatgtggtttgaggtcagacgcgtgaaacggacgtatttatatatagtatgtccgcgtaacctcagatcggcaacctcatcttagaaatcgacaaccttgatatctagtgcaaagttgctgtatctcttcttgcccctaacccaacccctgagcccatattcgcacagcctcttcatactttcacgttagcttctcaataatgtctcagattccctccagccagtacggaacgcaaaacttccagcccgcggccaacctcctgacggtaccctcggcaccgaagaagcacaaatacatctgtgccggtacgtttccacctcgagcgtcgctcgactaggctcgaaggaagcaccccgctgatcatggctgcggcaatcgtatcctgtagaatgcaacgctgagaacgaaatcaaagctggagagcctatccgatgcagggattgtggacaccgaatcttctacaagccaaggaccacgaagagtgagtccgccccgccgtcggggagtttgcgtcacccaatatgaacatgttgttgatcattcatcttgttctcctattctttctgttcaacagtggtaagcttgtttatggacgcctctcggctgtacgtacatgttcgctcattgacctcgttctacaatgatcaggtgcaatttgaagctcggtgaagcccgattccctgagattccctccgcccaccttcaatcatatacaaaaccacctcgacctcgaggcttacgacactacaccttatctcggtcccgccacgcataaatgtcccgacccgttttccatgccatatttgtatcgcgtatcatatcgcatcctgattcacatcgaacctgctttacgttaccacgatggtatcgaaggaacgtgttccggactatattacaactacaacgactcatctcatcgaagaccctacgactcatacacttgcaaccgatcgaaatcccctgcactgagcgttacgtccttttcaagctgtccagcctcgcctgcagatcatcttcatcagacgggcccgagcgtgctcctccggccgaggcgggacccgagtctccccccatggcgataccctctgcgacaggttgccgagtggttaccgaagaagctgccagcgggttgtttgacggtgtttctccgagctgccaatatcatttgaagattagcgagggggcaatgaccggctttccctgagctgctcaccatctgactggtgttgatgccgatctcatccaagacctccttgaggatcttgtcaccctcctcttcttccccttcgccctccgcttcatcgtccatcacgtcgtccaccgcatcacccatcatctcttctttcatgtccatggtttgcgattccttctcaaactcgttcatgatgcgttgaatctgcgaccgagcatcgggtcagaaatcggaaccctctggcgagctcttagactgctactaacttgaggaagatttagtgagcggttcatctgacccatagcctagcgggagtgcaagtggaaacatgaaaagctggtctcggttacctctatccagctccagcttaccctcgtcgcgcccttcatggcgaccgccatctgctcattactcctcagcgcctgcatccgcagtgagacggcttgcaactggaccttcatctgagtgaacttctggatatatctccgggttcgtacgaggtccttggcttgaatcttggctgccgactgaatcgaaaagctcatcagctttaccctcgaatcgagtgaagagcccgccgcctgactgcgaactgaccatctgcccggctttcgcactcttcttgatgtccatcatcagtttcttttcctgttagcagtggtgtcgcatcagtaatctcatctgtgtagcgacccccaggtgaaagtagctcacctgtgactccagcttggtcctctccctatcgagctccctttgagccttctgcagtgtcctctgatgctggcgtaacctttcagccggcgtcatacgctttccgaaaagcaggtcctgcaggatcaaagccaagcgatcaggctcaggtcgacccgcgtactatgaaagtgcactgactaggacctgcatgttgaacgaaacgtgattgctacacaagcgttgctgtttgtgtggttgcagagtgtttagatggtatcaagaagaaggtccgaattcgggtggcacagatcgatcgggacgtaagagtaatgtagggtcgaccagcatcagatccccatcgtctactactactactgcaatcgttaatggttgcccaaccccgattaggtcaccgccgttcgtcggatgctgcgtcatggttcatcaaaacgcgtaaatatgcgttttcacgcttgcccacccctaacgactttcagatgatgagtggtcctttgtgcttcatggcctatgcaactatgtataatacattctcgtctctcgagtacttttaggatttatgtaatgtcgtgtgctgaatgcttcatgcagtctaccgaggtgaaaagggcgagagccctatgcgacctgtagtgttctagatgagaggaaaaagagagacgcgggaccgagatgtctacgataaacatgcgctcatcgcttggctccggttcgcttctttcctcggagtgcgttcttgcctcgggtcttgcctgatgacgagctctcgttggtttgaccctgaacgtatcgtaccagggcatcgacatcgagatcggccgggagttgaccgtcagcaccgggggcttgctgaccggcagcggcagcagcggcggcaagggcagccttggcggcggccgtgttggggacagcggtgcgtttggtcgcggtagcgggcgcggcctgtcgagcctgctgaatggcacgaagctgctccagatgctttttagcggcctcttgctgcttctcggactgctcgacggcgccgcttaggatctcgtagttcttggctgcatcctttgcctgcgcgtcttcgggtccgagacgggtgcggaagatgtcgctggcgagcttggcgcactcggcagccttcttgatatcgccgttgaggaaatgggcctgagtcaactggctctgagcggtaccagccaagatgtgagtggatccaaacatggccgacgagatgcggtagacctcgtcgagaatgacgatcgaagcggcgtgacggttctgcgactggagcacgatggcgacgtggatctgcaacggcccggaagcggtgtcagcgtaagcgcattgtgcaggatcaaggcactatggctcaccaagatcgaaggcagctcggggtgatcacggccgtagacaacgtcccacatgtgcaagatgtgcctgaacagcctcaaagtgatggtctgatctccggcaacattctcgagcatggccaagttgaagtagaaaccaatggtctcggggtggtgcagacccagagttctctcgccggtcatgacagcctgtcgctgcagcttgatcgcggtggcgacatcgaatccggcagcaggatcggcatccttgtcctcggcagccaactgggacatgcgcatcctgatgagctggtgcatggtagtcgcgtactggttgtaggcggcggcgacctcgggatggacgacctggtgagtctgctcatacatattgataccctcgagcatgagctcgagaccgagcgtcatgtctccacggctcatcgtgattcgaccggtctcgaagacctcttcagcgacggcggcctgcgggatgttaatcgggcgtgagcttggattcggattaggagatacagctcggcccacttacggaaggagcggtgctcttgacaacaggcaacaaggtcaagatgtcggtaggctcgaacgtggtcgagcgagcgctggcagccgaagccttggactttttggactttttcggcttggcggcaccgtcgacagtctcggactgagcaaggtcctcgttcgatccagcgaaatcgtattcgcgctggtccagctggaacgcgatacgggtagccaactctcgaagcagctggggcttgcgcatgtcttcgacaaagtacgcggggtcgaggttccatcggaatcgcttggcgatctcgtcaatgatctgagtctgaaccgattgaggggtcagacgggtgtatgcgggcgcgggtccgtcctggaagtcgagcgagtcgtagacggcgactggctcggcgttcttgtcagttcccaacaagcagttgaggaagtgggagaccgcgttggcgctgttctcggcctgaagaccgtgaacgagacgtcgcaagatgtgcttgcaggcacggaacaccatctcttgctgaacgatagcctgattgcgagtgatagatattcagtcgcctgaaccatgctcgaacggacgcacaccgggctactcaccaggatggccttgaggtgaccggcaccttcgccctccgaggtcctgacgtacttgtcaatgtgagacatcaggtgaccgaggtacctaatgttgattcccttgaggtgcagatgcttggacaacgagacaccgtccatgatcccgacggtgttgctggcaataacgtcgaggacgaccgagggcacgaccacggtcctcaggaagatcgaagcgtccctgacggccttgatcgaggggtcagactcgtcagtctgcgtagggggctgatcagagagctcgcccgtctcggcatcagccttggcgggctgatcgacaaaggcgtccgcgttgaatctcaggtcgaatcgggggtcctgagtgatggcagcagcgtcgatcgaggtggtctcgggtttggcctgttcctcggaagcctcggccttgtcagcgtcgtccttcttctcgccctcctgggtcgaggtggcggcggcgtcggcaccggccttgttcttttcctgcttctcggcgtggatcttgcgggccaacaacttgagctcgtgttcccaataagtctcgagcaactcgggtcgcaagaggacgacgcggtgagggtaagtgaccccctcgtcggcgttggtctcgtttgaagccaaaagcttgccctcggtatccttttgcaaaaactcgacgtcgacggggcagagtcgaggaaggtcgaggaggtaacgcctgccgtcggaaccacggagacccttgacgtcgacgctcgtccaaaactcgtgctcgtcgcccttgctgtccttcatcttgtgcaaggcgagcttttggacggccgcgatcttgcccatgatcttgtgcatcccggcatcccaatggagcttgtcgatgccaccctcggaatcggctccgtagatgatcaagtagttttcctgatcattgaccggctcggcagcggcctcggacttgctggcctgcctcgagtgcccaccggcggcaccgttcacatcgacccaatcctccttttccttgtccgccgacttggccccgtcgtcgacctcttgctcgtcggcatcgtcccgccttctgctaaagatccctggcaagacgctctgacagacccatcgctctccttgccaatcgacgacggtatgtccgaggaggtagacattgtccacgtccatcctgttcaacaacctgaccccagcggcgtccttggcgtgcgagatcctcgcggcctcgtctccaccgagatgagtgtacgcgtcgacgctgttgacgccctttgtgaaaaagatgttgttggctagccacatgtgggccttggaatcttcgtgcgggttgatcggtggcaagtcgcccctggcgatggccatgcttccccggacacacgctgcggtgaactcggcgtgggtcttttgcaagatcctctctcgcaagacgcgttcctgtgcggaccccttgggcatctcccgagcgttctgtagctcctcgttccaatccctcgcaccttcgagcgcgtcgggggtgatggctcccgtgtacccgtaggcgagctgagtcttgatcagatccgggttgacggccgaatgactcggtgcggtggccaaccaggggtaagcgggcgggtactgcgggatggggacggtcgcgatcggttccctcgccaacgccgggttactcgcttgtccttgtaatcctctgagcgtgttggtaaacgccggcgagatggcgtgcaagaggtcgatcaacgagtgcgccgagatctctttcggctgggtcctgggtgccgggtcgaatgacacgctcggggcgttggaacgggcgacgtaccaccctttggtcgtgcagacgagcatgtgcgcctctccctcgagtgtgacgacggtgaggtagaccaaatgacccctctgtttcaaatgaggtgggggcgggttgaagggcgaaaagatcaagctcttcaggcaggccgggtggggtacggcgggcatggcgaggggcaactttgagacgtcgctcctgggcagtcccttccattcgctaaagagcgcgtcctcggtctcggtctcgggttttacaatcttgggcctgttcgccttggacttgttctgcgacgtcccgttgacgttgacgttcccgttggtctctttggcagacttggcctgtccttcctggacgacctcgacggcggacaagcttccgctgttgatcccctcaaagatcgagggacccgggttgatcccgatcgtagggaataccggggtggattccgaaggaggcatcgtgtactctctgagacgcaagacggcctgcctcgcatccgcctccgagtagggttctatccacgtcatttacaaacatttccggatgtcagcacgaggcgtactctcctctgtatttatacgatgatctcgatagggcggcggggattgggttgctgactgacctcgttggacgatcaacaccctctcgtcgtccttcccctcgagatgcccaaagacctctcccatctcgaaccaatcgctcaacttctctccttcccggatctctacgccctccttgcccttgcccaacaacctgcccctcgtggtatcaacgtcgtccggcttgttattgtcgttatccgttgccgatttcttcgagggcgggatcctcagggaataaggacccaaccagtaccctcccgtccattcgacgaggatggcccggatatcctggatagtctctgacggttgaggatggatgatgaatgtggacggggtgggttgtttcttgtccccgccggtctttgggagggtctgggcgtaggtaggtgtagggagacggatggtgaccggtttgactgtttctccgtcggaccgtataacgaggtgcagggtgcggatcgtacaaaagacggtagtgaataaaccaaagtcagtgtcgtcgaacatttcgctgctcgtcgaatacgttttcgaaaggtcgatcgatgaagactcacgttcgatcatctgctcatcagcctctacatcctgctcctgctgttccgcctgttgctcctcggtcttgtcctgagggacgacctgctcgtctacaggcttttgttcgtctgacgacatggttctattgcgctatacggtatggaatcccaaggtcccaaaaagatggaatttgaaaaagggcggcaagggggtatggtgtgttcgtgacgagagttccagatcgagatggtatgttcaatctgatacctgaagatatcccgtgaaatagtcagttgccagtgtatgcggtgtcataatttcttgtgctttggggcggacgaatcatggagatcgacattttcgtcatgacctgcctgcatgactccactgccgatcgatcgtgaatcgaggtctcatgaaactcacacgactcggtccgttctcgatttccttttttttgtttaacttgttccgtctctcgattcaaatatgcccgagataccgtcctattgagatgagccggttgaaatatcgagttttcaattggatgatggtgatgatagcgaatggatggatggtatagagattcgatttttggtctgtctggcttcggaataatcggaagacggaagagagtagattcttgttttcaacctgacattttcgatttttttgagaaatccccccgaaaacaagggcaaagacgggggagatcgacgattacgtaagcaatttgtcgactgacaggattagttacgtaatcatcataaggcaacatttcatcatctcatcgtcggtcgatcaagcatccatcaatttcctgtcaccatcatcgattcgacaaccacaccagaaccactctagcacaaccacacaaacaatagttcacctcgccctcatcatcaccaccatgtcgaaaacgtacacgccgacaccggaggatgtagccaaacgagcagcccgcaaggcagaaaaggccgctaaaaaggctcaaacggaagccaacggcgggatccccccgtctgaccctaacgcgcctaggatactgaaacgacaatgggtggacgtcgtgccctctgccgtcactcgtccggaggaggggcagaacgagaagacatcggaggaaatggggagagtgacggtggctacgtggaacatgcttgctcagacgttggtccgtgagtcgagaatcgttccagaagatcagattcgtcatcgtctctcacctggcagcacgacgctcacaaacgaaactcttcacttccgtgttcctcgtcgatcgggtttgtcacttgctcgggagttatcaggcagggatttattcccaggttcaggtaagctccccacccttgtcgcaacctatcactccgaaccgaaatctcactccacctgctttcctcccgtcatccacccacccgaccgaacacgcgcgccgactcaacgcagactgcctcaagttcaaggaccgtagtgatatgctctctgaagagctcctcgcttatcctgctgacatcatctgtcttcaagtgagtccactcactcccacctatgcgcctttcgtctctgcttcgtgggttcgtttatcgatcataatcctaacgcgtcgatatggatgggttaggaagaggataggttgacgcagatccctttcccgttggagactgacggggggttcacctcggacgaatcagctacccagaccgatacccaaacctcgatgtcgaccccgaccccgaccccaagctcgagctcgaacggctccaaacccagcccctcctcgaaataccgggccatccaagctcgtggtccgaggaagaaacacggtctcgctgtagtatacgatcagaccaagtttaaacctgcaggaacacatcgggtggtcaggtacgatgaagagtttctcagcgctcctccttcggggtcaggagcgtcttcgggtgacctatcagacggagtcgcgcgggacgaggagaggcgacggagaggtgggacgaggcagacgaagaatatcgggttggtcgtcggcctggaattcgtggataaacctggtaaagggttgatcatcgggacgactcatctgtgagttcaccccttggccatcatcgatacacatcacttcgtccttcctctgctgaccgacattctgacacgacgaccatacgctggactgtagtttctggcaccctcaatacgcgtacgaacgtactcgtcaagctctcctccttcttcgtactttacacacctaccgtacctctctcggcgtcgactggcccatcatcgtcgccggagacttcaatacgcagcctagagaagccgtgtaccatctcttgacccacccttcgcgggacctcggggagagagagctgggcgaggtcgatttcagtcgggcggtgcatgatagtctcagcaaggtcgagcaagggatcatggccgaccgggaaaaggctcgggaggatgccgccggacccaaatcagacgtcggggagggcgaggaagatgtcgaggaggatgacgaaaaggaggaaaaagccaacaaggatcaacctatccctaccgatcgacctaaaggcactcgacattcggagccatctgatggtctactcagtggacacgaattacaggcgatggccagggagatcttgggcgaacggggattgaggagcgcgtatgctgatagcgattgggtcggtggggacgaggcgcgtaaaggattgactttcgccgggaggggcggcgaggcacagtttggtgacaacgagccagggtggacctcgtttactccgtgagtaccagcaaggtttcgtcgcctagacatccactgaatttttgcaaattccgcatttggctaccgtgtatgctatagtctctggcgcctaactctagactacctattcgacttcccccctcccacatcttcggcgccacgcatcgaaccccggcgaatcctcctgccacacgcgaccaaggatctcgaaccgggccttccaaggaagggggtgtgcgcttcggaccatactttgttgggcgtcgagtacgcgttctacgagtagatgatgttgtttttgcataatagatgtaagacatggagcatggaacgcataatttgccttgttcgttccttttagttcacagcagaaaagtgccaggccgttttgaaagccatcatcgacgctagcttcagaaagcgatacatagtggactgtcgctttaactcgtaccgggtcccatgagatcacgctcgttcgtctcatttacacccagtagccgataagcgccatgattccgctgcccgtcaggatacagatgaaaatataagcgatgcgtccggcactggcggtctggatcttgggattgaaaagaatctcatgtgcgagcagctatgaaacaacaatggcgaacgtgagctgtatttccaatgttttcattggccgagtccgaacttgcctcgactaatccagtgtacagcagaatcccagcactgatggcatcgagggttccttcccacgcggtcgtggttgcgctgttgctgttataactgctgctaattcccagaccgatagccataccgataggcctacgacaccatcatctcgtcaatctcatttctagagaggcgattggacgctcgactcacgtcgtcacggagtacaggaaggaggcgatgtacggagcccatcgcatgttccggggtagcttcaaggcggatagtcgggatccgacacctaacccttcgaacatctctagattattgttcaaagtccacccgttagtatcagctatcatcgaaacccatctggaatgacgcacgatgaaagatgatcacaacgaagagagtcgtgaaatcatcattcaccgccagggtcaatccgataaaaaccgagtgcatgacgaccccaaactcgaggattccgacagcgataagctgcgcgactccatccgtagtagtggtatcgtattccggtgtgatcccgctgtcactatcggaatcactaaaatgggcctttttagcccaagttgagctcgtaccatgctgaatcggcatggcgttgccgccctcgatctgagtgggccgcgatgcaggaggtccgtgggcacctatggagtgatattcagaccgtcaagccaattggaaacacacgtcgacggtgcagttacccacagtagtcaatattgagtttagctaatttagcggtaccgattcgataagcagcaaactcgataaagaagattagatacacagctgccatcgctatagcggcagcccagtcctgaagtagagtacattatagttcgtgataagttcttttggtcgctctcgagggccagcgatcgagccagaataccaacatatttgagccagcctccgcttaagcatggcgatcctaaactatcgaacgccggcgccagcaggctgtcatgtcattgtggttagcgctcagacatgccatagacacgaatcgatgaaagactgactggatgaaagctgtcgctatgatgacacctgaaccgaagtatttggcgaatctgcgttgcacacatgtttagcagggacgagctcggcgctgcagagcgcgactcactcgaagaacgccacgggacaccacgacctttgcttgagcaggataggagcaagggtgcccatgaatgaagtcaccaatacgacaaagatcccagcgacccgaagaccaagtcgatttcggccattgtcggcaaagcattcgctatcgtccatttctcgtctgcgaggggaagcgcgtcaggtggcttgagacgaagtggagtggtacgggcagaacgatgtcgcgcataaccgtgcgttcaaatctctttttcggcgaggcatccggtctatatgtgcgagatcaaacaaacatcccgactgtcctacctgtcatcaacacagtcgagcgagatcttgtgaaaaagaagcaagtctcgcttcgatataggtaaccctcggtcctagcggtgatgaccgagatgaggactttcgaagcgcagtcatatcgcgacgcgtcggttaataatagcaaacagctcagacgctttagtgacccgagtcgggagtggggtaacatcgcgaaatatgcatgatgttccgtttttgtgactgggactccagcggagacacatcttgtcttgagcggaccggcactacaggaggtataccctaagaaacagcaaacagaagcgtccatctagactcgccctcatcacgattgacacgatctgaccccgtgagtaaagtgctcgctataggagtgactattgtagtcgtcgtgtttcagtccatgtctccgaatccattcggaagcgaaaccgaggctgtgagagtagatgcaggctgagcgaaaccaagtcgttgtcgcgcagtcttttacttacacgctaccagcctcggcaaacaacttggcaacctcgcacccagtatcccatatttgtacggcagtgccatgccgttccgcatacaagtccctcttgaccctttcctggcgaatttgagctcgctgcgctagcatcgaacgcttgtgaacgaatccttgcgagccgtcaggcctggcagcggggtcaaaagtcgtggcgttccttgcgggtcgaaccaaagctcggctgaacccctcttgtacgctagaagccgacgagaagtcccagggtgacccttgtccttccgcatggatgtctgaagcggcatttggtcattagtggctctcgcggtgaaattttgtatctgcacttactccagtaatgccatccaccagcggcttgggacgtataaagctcgagctgcggtaagatcattatcagataccggtgcggacctcgtgttgtacatataccgagcggaatacgtacttgagcatcgcaatactctccaattctctcaaagccctcgtgctcggcagtcgagttccattcaacagcgcaaccccattctccgagctataggatgaatctcatcagcgcggcgtgcggacaacgatcgtgtcattatgcttacaacaacgttctggcagaaacaatcaaggtgttcccgtcagtgactgtgcttgattgtcagatgacggaacacatacgggtgccaagttctgtaaactccgagtgtcctgctttttgatcgaatccaagatctggtcgatggttgccgtcttccagttggcagagtacaaatagtctatcgatatcgacatcagttcctgacgatttggatcgacctccacgacctttctcacagggatgaacgtcgaggacaaagaagccggtcttgtcttgaacccagtcgtggaagtagtctccttgacctcggaagccggcgtaaatgtagatagggaagtcgaccccggcgatagcctggatctcggcagcgacctcggtgtctgtagaataccgtgcgcgattcaggcgtctgggtcgatagcagattcagttgttagcaggaactcacaccatgtagccaaagctccagcatcctcggtcgcctcgttcagtagctcgatcccgacgacattttccttgtccttgacctgggaaacgatccacttgatgacctctttcgtggcacctcggttggtctcgctttcgatgaatccagccacgccgtccttgcggtcattctcgccagagtggtctgggtgggcataggaaaagggtcaatacgaaaggtttcgggcttggtcgacagatggctcaccccaagtgttttgcgacctgaattgagagaggaataccgtcagcaaatctctgctatcccgacctcgacctgtctcgactcgcccttgcgctccatgcaaatcgatcaagacacccatccccctttgattcgcccagtcgatggctttgaggacgtaactccactgcgcctcgtacttgtccatgtaaggccagaatttggagtcttcgcatcgacaattcgctttcccaacggtccagtagccgatctgggcgcgataaattactgtcagtgcacaaagcagcggcatggacggcgggattgagaacttgcaggaagtctgacggtgttgatgcccttttcgtgaagcgcatcaaagtctttgtccgtgacccagctgaacggtacgagaaaatcatttgcgacgtcaagccctgcatattctaaccgggacgagaacgtcacttacgtgtcccaatgttcccgaagctgggcctgtatagacagacccatacgagaatcagcctccggtcatctccatcaagaaccccaacccctaccgactcacggtttcacaattggcggccaggttcaactcgccgaccttgtcgttccccgtacagtcgtacaatccgggtttgagccatttctcggtaacgagccatcctcccaggttgactgagctttgggcgcgtaatcggtaattgcgagcggtatccgagatctggctgggggtcggtacgggagcagccgcggtgttcccattggtatcaccgacggtcgctcctggggtcgggatgggttgagagtcttggttgggaccgacagctggggggctgacgatggtcgtctcctggggcgaggtgaacttggcggccaacatcgtcctgaagaggtcggataggagttccatttgcggtttatccgatgtagtttcggagctctctgcgaggagatcgatcgtgcgggtaggaccgtgacaatcggtttgatgctttttctgatgatgatgcatggctccgtgtacggcggtggccgtgagcaggcccccgataacagcgaggttcaatctcatcgtggtgatatgtgtactagtaggccttcaagatcgattttctgcgtctcgttcgacagaagggcaagggaaaagccggtggatggaagatgcctcgaatttggaaaagtcgtcgaccaagagtgtagaaaaaggggaaaagggggaaaagaccgtgaacagaacccaaaggttcttcttataccgtcgaggttggtcggaatgttgactcctccagtgagtcttgcgtgaaagaactgacgacagatggtgaatgagcaagaaatgggaggtcgtcgagggtgacgacttgactacgtcgtgacgatagctatatacctgatctagcgatttcgcgtgattcatacgccatccttcatcacttctcgtctccccttgtttattttgattgtctgatgtactgatgaatgatgaatgatacctgatcgcatgcacccctacccccttgaatgcggtcctatcccataacagtccctctgatcgcgtttcactttgcccccaccaacgcccccagtctctgttctcccgcgtctcgcgtgcgtacgagatcaaggacgtcaaaggcatcatcaccatcgccatcacgtcggatcacatcatgaccatcggactgatcccaggatacacagcgcggatgcacagcacggacccgtctcactcaatctcagactgcgtgcttggcgatgagaagggagatccgatgtctatcgagttcccggccccttgtggcgttctcgtcagacgacgagtagttcccgacgcgtttcaccgcggcgcccaggccaagaccgaacgggcgtcgtacgtttcgtctcgctgatgcttggtcatcaaagacgaccgacgacagatggattatgctagccttcgagtgcctgagtgataacgcgacgcagggtactcggccggggtgaaacggtgaccggtgacggacgccttgactttcgaccgaaaagccttctcctgttcttcccgatcaatccaatccagtccatccagatgaccaggtcagcacgtccaggtctactcacctcctttcccaaccagaaaccttcttttcttacccctacacagcaaaatatatgacggtccttccagaggtgccgaaaggcacacagctgacccccgatctcccattgactcggtcttatcgaggcagaaattatacggatacgccgagcccggaagacgtcagatgagccccctgatcctctattttcctctctctctgcctctctctcgatccctcaaaaggccgtaaacgtaagtcgggggtatcaccgtctcaacacagccgcctgatcattggatcggcttagcgcagccggatgtgcatatggtaagacgtctcactgctcctggacccaattgctcgtgaaacgtgaaacgtggaccgaaccggagctagcctgacatccatccagtctctcgatatactttctggaagaaccatccagaaggttgacattcacgacggcttgtcatagggaagaagggtgtgaagagcgactctggaacggtgcacggcgcggaagactttgagggccgcgcgttccagcccgaggaccgagccgacgaggtgattcgggggggattagatgggtatataggctggtgatggaaggggggtcatgtttggccattttctcgacatgcattcgatcttacccgggcgcgatgacggaactgagtctgatcttgccttggtcgagtcgagtcgaacggttgtctcttgcactgcgattcgatccagatctcgtgggtcagatgcgacacaactcgacgtaaacgccccgtctttgtgacgctttgtcgcttccgcttggtcgatttgacgacgaaagagacgtcgggtagaatcggacatgagcgggccggaacagccgctacgaacgatgattacacgcgtgagaaagcggatgagcgtgctagcccgggtgtgttgtgtgtgtgttttgggaaaaaaaagggagagccggggtctcttctctctctcgctcccgcgcgtgccctcctcgccccgcctctttccctgtgcctcgctcgagccagcgcatcccctccctccccttcgtctcttaatccaccgcaccacccacaccagaaaaaagataaaccctcacccatcatccatctatattcttcttcttccttttcctcttctcttcttcaagagtcttttcgtctctcattacaatcctttaaacccatacatctggaaaaaggaaggtgagcatctaccccagggttacacacacccatctcctatccgtctggcccgtcaagaccagaacgcaacattcgggatttccaagacctcgtagcttacacttctcgtgactcttccccccctcgttatcagtaccaaaatggccgccgttaccaagccccaggagatggttaagaagcctaaggacctcaagtccttcaccagtgagtctttcacccccgccccagccttgggcctggtcgtgtgatcgggcctttggctctcgggaaccgatagatgataaacggggcgagatggctgacgtgcaccttgaacccgttcttctcatcacagtcgacttcatgatgggaggtgtctctgccgctgtcgccaagaccgctgccgctcctatcgagcgtatcaagctcttggtccagaaccaggacgagatgttagtcccgcgcccttccccctcgcgttcttttgcacttttcactaacccgccaacaaccccccttccggtaggatcaagcagggtcgtcttgctaccccttacaagggtatctcggactgtttcgccaggacctacgccgacgagggtctcgtttccctctggcgaggaaacaccgccaacgtcatcaggtacttccccacccaggcgttgaactttgctttcaaggactacttcagtgagtgatccgcccgtgcgccgaggttgagaatgtctcgctgacgcacgacccgcttcctctgcgcgcagagtccatgttcaacttcaaaaagtctgaatcctacgccaagtggttcgccggtaacatcgcttccggtggagctgccggtgcctcgtccctcctcttcgtctactcgctcgactacgcccgtacccgtctcgccaacgacaacaagtcggccaagaagggtggttccaggcagttcaacggtctcgtctcggtttacaagcagacccttgccactgacggtatcgccggtctttaccgtggattcgttccctccgtcgttggtatcattgtctaccgtggattgtacttcggtctttgtgagtcaacaggccgtctttatcggtcgtgccagccgttgaaccgtagactgacccggtcgtcttgcgccgttcgtagacgactctttgaagcccgccgtcctccagggacctttggagggatccttcttggcctcgttcttgctcggttggggagtcaccaccggtgccggtctcgcttcttaccccttggacaccatcaggcgacgaatgatgatgacctcgggtggtaccggacctcactacaagagcatgttcgacgcttccagccagatcgttgccaaggagggagtcaagtccttgttcaagggagctggtgccgtgagtcgacaacccgagagagacctacttttcatcatgcaccgacactcatccccctcatctgctcttttttcggacgcccatagaacatcctccgtggtgttgccggtgccggtgtcttgtccttgtacgacaagctccaggagctcatgttcggcaaggtctactcgggtggttccggttaaacgtagcgcgatcgtcgttatgtcgagcttgtcaaccctttttacctaccatgaccgccttagatttctcattccaagaaaacggaaaaacaatcgtttcaaatcagacttgggcgtgtgtggtggtgtcgccggcgtgacactcattccagtccagtccagtccagtccagtccagtctagtctgcgtgtttgtggctcgggctgtgttttcgagctggaatcgcctgagcgaggtgctggactttgcgccctctcgtcgacgtgtttttcgtgtttctcggccgaattccggacgagagctagccgatcgaaagttggaaacgcatcgacaatggcctgggttgttgggacttgcatgacttgaattggtgacctcgattcatgaaggacgtgcacttcttaagagatatcgaccgaaagttactccttctatttacttatactcattcaaatccaaccacctcgttcgacctttataccccgcctaacagatatacatacggaccatcatgtctactacctcgaccgtccacgctgacggactcctcttcggtgggtttgacacacgtttccctgaagatctcagcagctgatcgattttggctatcacgctcactcgtccggacttgtagatatggacgggactttgcttggtgcgttcctgcatgctagaagatctggccagcgtttgggtagggaggggtggctgatcaatattcgacttcgatcgggatgtgggtagatagcactcccggagtcttggtcacttgggaagtttacgccaaggagcatgacctggatctcgtcgaagtgctgaaaagtaagtgcaatggagatcttcaatggagcaggatgtcgcaactgatattcaatctgctgctgcgcgactctagctagtcacggagttcgaacggaggttagcatcgcaatgtccatgttgggggggatgttccgtttgctaaacgttctaccatgcaacgctttaatcgcacgcaaccgacactctctcgactgcaggacaagtaagtcgacctttctatctctccatgcgaggctcgtcacatcgactaacccgccccattcctactttccagcttgaagaaatggtgcaacgtcaagcccgaagatctcaagacagagatcgcccggttcgagaacatgatcctcaacgagggagctcggctcaagaaggaggggaagcagggtctcgagatcttgcccggcgtcaagacgttgttgaattcggtacgtctggagagagggtcgaatcaggtctcgattggatgggacggatgggacgccaggctgacccgcttgatcgaggtagatcccgcaagacaactggaccatcgtgacctcgggtgagtcacgtcccatagcgaagacgtcgctgcgcagctgaaaccgtctatacttttcgtctcgatcagccacgatccattacgccgagcccgctctcgagcttgccgaagtccctaagcctccccacatcgtcaccgccaacgacgtcaagttcggaaagccccacccggaaccgtaagtattgctatccatttccttcacatcaccatggcaaatctccgaactactcttgttcccagctacctcaccggcgcggaaaagatttcgaaagacatcaagaactgcatcgtctttgaagacgcacccagcgggatccgatcgggtgtcgcgtcgggagccaaggtcttggccgtctgtacctctcacactcgagagcaggtcgagggatacggagccacttggatcgtggatgacctgaccaagtgagtctggattcgctcgtgtgtttgaccgagattgggggctgatgagaggcgcacgagtagggtcaaagcaagagctgtgaatgggtccctggaactggagatcgacgaatcgccaaattagaaatggttgccggtgtctttaacttgaaatgctgcatcgaaatatagaggatattgtaacgcatggcggattattatacatacaaatggcacgactgggagcggcaacgtggcggtatctatcgacatgcgaaagatcaacctagtagtagtgtcgtttacggtatcggtatccaggatgctgtggcaaatacacgggttgaaccaacggctgtcttcggtaatatccatcatccctttgatgatatctatgggtatttcctgtatatcagcgctgtcctagcgcctttctagtggcgcggactcaccttcggccatgccgactgccgtagcttggatcatcgaagcacgaacccatcccttgcgtgtggtatccggcgggtcgcgaacgatgtcgccttcgagaagagtgggatcttgatcgagaatgtgtgttgcccatttttccttgctgtttcaacaccgctctacgtatcaaccatctcatcttgccatctcatcttgggaactcccggaccgactggtatttgtactgtacagaccgtgctcaacttgatgttcttgtgacgtagcacaaaggagtgccgacgaaaacgacatacgctgcggcgtctcagtagtcgggaggaagctctacttcgtcatagtaaccttgactggtgaggcgggaacatatggtctctcatgcttactgactctgttcagacaggtatattacgtcaaaagcccatagctagtggtgatcacaccgagatgttgacagcgggacatcatgatgcctttggatcgaattagtgcccatctcggtgcttcaaccccggacaaaccctgcaagacaggtctccgaatctcgaatgcgtcgtttacgtagtttcacgggccgctccagagacgcaaggtctcaacttgtgattgcatgccgacttgagtgtaagatgggggctatcatatcgatacattggtgaaatttctctcgacttgagctcgtcgagatttgctgctgatcctctttcatctttgtctgtttcacgatcctcgtgcattgccgaatgtgcacggggccgaagttgatccatcagcaggcctagagcgcatcgctctcctccttcatgccatgcagcgccttgcgtcggtaagcgctctggtctctcaaccatcgtcgataagttttgaacgaagagatcttctcgcctgtaggtccatgatgagcagattgacaaacaaaatcacgagagacagtttaaaaagcgtcgacatgggacaagggatagaatgcaacagagaggatcgcgaatctgtacgtcagcgccatacccaaaacaacagatcttgcgtctggagcgtaccatagtaatcaggtgtaggattctacagtaaagaaacgaccgaggatatccaccattagcgacagtgtctcgcccaccaagttgaaaatatccacctcgatcgaaacttacgttaatggattggtacgaagggtccacacgcatcgacttgatatgatcatagaatctatctcgcacattgtcgatgagcttctattcaatcagttgtatgattgtgaaacggatacacctaccgcttatccatgatctccatcgacttgttcttgctcccgttaaacgccttgaacagaagagttccaatggtaggtccgattaggtatcctagacccgcgcatccgagcctgccatgagcaatcgccggtacaggcagatttagacagccagtcctcagcttgagtttcttgcgactagatagatcgccggtgcaactcacgtagcacctccatacacaaacatagggtctattccgagtatcggctgagtggggtccatttccaagcttccaaagtacccggctcctccaaagaaggcagcagcagttgtggggatagaggctacttgggagactatgcgtcgcttatgacggagtgccaggtattggggccatgtcagggcttctccggatgatgacgaaggggttgagctggtggttgacgacgaagtggttgtggatgccaggcggatcgaggctgcgtaaggcttggtggccacaaccgggcgtaaaagtgtcttgtggagcgacatgtcgtaggaacacactactatctagtacggattgcggatgacaagtcagatcgaacagccaggtgatgttgtagaacaagtttgacccaggttatcgattcccgcatcttgcccaagctctctgatctatcttgaacatcgcttcacgacgagtctacgctcaaattaccgagacgatcagaatcagcatcaccctagttgatgacctcgaagtggtgtaacaaccagctcaacgtcgaccacgacctccttcagaataaaaacgagataggcacactacaagatggatccgaatgtagatgccatgagtcaggacgcagagatgatggaagaagagccagaatacggtaggtcgccttgagcgcgtggagcatctccgtatgccctcgacatgtcaatgggatgtaagctgattacaaactcggccgcgacatcaaagctacgagtagtcaaggtagctcttctcaaacttcgactctgacttggatcgtgagtagagggccatgtcagctggcacgagagtttgacgagttgacagctcattggggatcatatagaattggttcatctcacttcccggacatgactactattgcgaggtcgacgaggactacatcgaggatgactttaatttgaccggtaaatcgtattttgatcgaatcactcgtttcttaggctgactttctcgcgctgtcgtcgttccaaggcctgcaaagtcaggttcctttctggaaggaagcgctggagatggtccttgacgttgaaccaggtcagtaccgctagtcggtcgctgctcaccaacggcgagatactgacagcgagcatcaattgtcttttttctcacgctctcgttcaatccgcctacgttcccgtggtcaccgctttatcattatcgatcacagaagaagacacattgacgattcccgacgtttccatcatcgaatcctcggccgagctgttatacggtctcgttcaccagcgatttatccttacgaaagccggtctacaggccatggtaagttctcttctctcgctactcgctgatctatcgtcactaaagttccacgtcttctaggctgaacgtttcgagcaatccgccttcgggatctgcccgcgagtgtattgtcaaggccagccggtcattccttgcggtcgagtcgatacaccggggatcgatactgtcaagctgttctgcccgaactgtcaggatatctacgggccgatgagtacaaagtacggcggcgttgatggtaagcctgatgtacttataggaactctgaagctgccttgctcacttttccttccgaatatgtttgcgatttcgcaggtgccttctttgggacgacctttcccaccctcttcttccagacctaccccgctttcctatcgatgccgttcaaaggcagcctgcctcccctccccagccccgcatccacaacatcgggaccaaatcccgcttcttcctcttcgacgcctagcaagaccgaagcacccattgctggcgctcctgagcccgtgatcaacccagacccttacggagggcaaaaacttccctcggctggccagtacataccccggatctatggattcaaggtgtccgaacgggcgaggagcgggcctcgcatggcctggctacgagatcgaccggaaaagtatgacgatctggccaaggtggattggcggggtcgctggatcggatcgagagagcgaggagaaggggaagacgggaaggctgccggatcggtcgttgtagaaaagagcggggagacgggcgcgttgtttgacgaggacgaggtgatcaagtcggataacgaagaggaggaagaagaagagtagcaaatcgggtagacattagccgagtgctggccgtgtaatatagttcacctttgtcgtgtagatggtcacaattgtgcaaagctcccgtctatgtatttcatcgtcagcaagtctgcaagcgttgtgtctggcggccgacaccgcacacaatgatcgaaaataagcatttccaacctgtgctaaattgcgccgaggttgaggagctgatgaccattgccaattcagcagcgactttttaccatgagcccggattagttttgcactcgtatcaaccgctgaacgactgccagggtccggggtgctttagctgacaatatatacggcgacatctcttacgtgctccaacgcttgagtgaaggttgggccatgggatcggatctgatactgcatatttaatgatagggcgagctcagctcgggtatagggtaatatacatattaggtagcgatccgattcgacgcctatcttgagctacaattcacaacccttgcatcatgttggcaacctctgcatcaacagtttcttccacgccctccatcaagggttcctctggagtttgggcggaagaagacaagactgtcgcattattttctgatcgccgtcttggcatggcaatagccggaccaaagaaatcggcctcgtcttcactttgcatctcgctgtcattaccacttcgtcttcgctcgatacccgcagcgtccgactgtgcgcggccctgcgggttcgagttggtgcgaccggcagacaccttgacccagcgtcggaaccaggagcccaagattctcttgatcgcgttgtcgaaccccaagtactctgtgtttgtgacgacaccttgccaagtaacttcgcctctcgcgagcgcagtctccaaaacagacgcatcgcccctatgcaggtaaatcggatatgccggtttgagctatgtaacgtcgatcagacataggggcttgctcaccagtacagtacgtgagtgagaacggcaaagctaccgggatcggggagtggtagccagatcgtggtcgggacatgtaccggcgtgtgtagaacccttgctccctttgtttgcgtggatcgtgcctgtcttctaggtgaactgcttcggccggtatgttcgtttttcgcgaaagaagagacatcgctcggtgcagaaggaggagggttttgacgcgatgcagatggacgcgatgccaagttcttctcgtcgagcagttccgcgaacaaggccgattggctgaccagataatcacggtgcaggttaaatgtcatgagctgtgaacagtagtattctcattgctccgttcaaaccaaactttaagcttcaagccacactccgcaccttgcggctcgcatctgagccttgagcagaatctggtacattttccgtgcgggtcgcagcgaaggcacctgtgttgaccaaagccggtgatacacccccatatgggtgcgccaacgacgaggactggcgttgcgacgtcgcctcttgacagggattgtccgcaaaagaggcatactgcgtgggtgaaggggtcgtctgtcccgaacctcggatgggaatgactgattaacagatgcgcgtgagcgatccactcaagcaaagtggacatgttttcagaagatcctactcacggatgcggcaatctgccgtagcgggattgttccagaagctgagagcaagcttatgcaagctcttgacgaaataggatttgggtatgccttcctgacgtttcctgtcccgggtcggaagcggttgatttgagctcgatgctgccggttccccgcgagcgttggataaaggtggtgccgagctgaatacgggtgaagcgtatccagctgtcacgggcgtatgcaaaccctgaaagtgagtagtacccgacgtgggtggaggtatgttgcggagaatgctaggagtttgtagatgacccggactgtcaaggttgacttcgttcttggctgagcgctctcccgacccgctccgaggagagtctggccaactaggagcagcctttcgacgctcgcggcgcatccctgtcggagaggtcatgacgagaggggatatgggaaagctggcaaccggttgatcctctggcgattgggctcctaaggactggtggccggtcaagctgtatcgtctctctatagcagccatggtaacaggggtcgtccttgaagatgacgcagctctacgatcttcagtcaagtatgggtgctggggttttgagaaacgggctacgaccgagtttggtgacaaaagacgacgatgagtcgagggagtttgcctaaaggcactgccaatcgcagctatcgaagcggatgaagactgatacggtgagttcgagtcttcctcatcccgcctgtgacctccagcttggccgcagtcgacattggtcaggacgctcaacggggtcgatttatcgccgctcgcccgtttttgaaaatcggtcccgaggcggcgagacatatcgtgtgcatcctgtcggtgggactcgggctctgtaggctgagacagcgggggaaagggtcggacaagaggtgaatttgctgagcaagaggttcgctcgtcaacaattgatccacagaaatcatagttttagcgcgccaaaagtaggatccagacaaagaagaggttgcgccggtaacgagaggggcacacgaacggcaaacggtcaacacccgggggtcattcgttctttcgatgacagaatctcacgctgtgtcatcacggcgcagcaggactacgtctgttgttttctcttcctttttccccgtgccaaaattgtcccggtcgaacctgatagccgttggatcggttgggcgaacaaaagaatacctggacgctcgcgattctgccactaaatatgccacgcggaagtaattagcaggagattacggccgccaacctcttctgcgaagaagcaatcggaggatggaagggatgtacccaaatatatcagtgacaactcgctcggtcaaagttggaaaacaaaccatgaaccaatgacttccctttcttcttccgagcaggatctttgcgtccggtcggaacgacgttcgcactgcaagcgagatcaagaaagggttgtgtgggcctagagggcccgttgagtgtgaagatctagctacagacgggacgaaccggcgttcccttttgttcgaaatccctttgtgtatgagcacggtgttggcaatcctcctgtcagacgaaacaaagaaagggggtcgtcagtcaacgatcgcgtcagctgcacaatcacaggtcccatttgggactgctgtcacggcacgaacaaagggatgacggtgcttcccgaatcttgtattccgcaatgtcaaaaagtaaggcctgcgtcaatcgcagacttgtgaacgtgacgactgtcgaggctgggaacatcccatccgttcgtggtctgctcgtttctttgtgctcacctatccaccggatcacaggcgatctgcaccgcccggcggttgcccaattcgtttggcgaaatacgtcatttttcatggcagctatgatacaaagagaaattgttctcaatgctcggaccgattgtccgaacgaggacaatgatatcgaagtggcattgtgcgctaattgtcgaacaaggttcctcgccgccgctcccatggcaacgaggctgaacgttaaaaggtccatggcgctgactcctcttcgtatttgtttttttacttgaaaatgaagaagagcgcagatggtgggccgaccggaaccgaatcgactgacgatggtgaagtcatcgcatcttgtcgtccgcgtccttcaatcagccgtacagaccctatattccctcacaagacgggagagagacgagacatctcgagaatgtcagctgtgctaaaatcatgcgccgttgatgtgtttagatgctgggactcactccgtaaggcatcattcccatcccatagcctcccatgccgccatagccccccatcattccccccatgcctcccatcattcctcccatacctcccatgcctcccatcattcctcctcccatcatgcccggatacattccaccgccgtacattcctgagtatccgtcgagacctgacatatgaacgtgatgttctcgtctacggcatcaaagggtcaaccaagggtcaacagtggaacgaccacccaaggcggtcccgctaggtatagcactctggacgcttcgagagtcgacttaccgatgagcatcgacatcatcatcacggagatcatacgcacctccgcccatttgctatgtaatagtggaagtagcgtatcggatcatggtcggttcacgctgtttaaagcccaaagagaccttgacgcggactcacgtagcctggatagcctccgtagctgtaccaacggggatcaagctaccgttagctgggacagatacctcacgctatagccgacgtgaactcacccgtagcctcccatccctgcacctctacaaaggtatcgcattgattcgttcaacgcgatgattagcttcacgtcatgcgttgcctgcagagcggctcgaacttctgtctgccacttctaccactcacccatatccccctcccatcatcgaataagggtccattcccatacccattcccatcatccctccacctcccatcatcccggggtacatgctggagtgaagcgtgggtcgtgtgagttcaggtcaacaagccttctcttcctgtagacctaccctcccatgccgtatcgctgaaacgataggtatcaaaggcccgattgatcaccgcttacctttcgaattgggcaaaagagactactcacctgcataccgtatccgccgtagccaccgtctgtcgtgagagtcgatggtctaatcaatacggctgatctggttgttcctactcggcggtcaactcacagccacccattccgccatctgcttcatgtacaggcattcccaaacgtgaatcagtgtattagcgggacgttggagaagcagtgatcgaaagattagttgaggagatcttacagccgcccatcatgtatggctgtagttgattgggttccatgataggtgatcagtaagtcttgagggttatggtcgtttgacttacattcatccttgatcacgacgtcgaggttgagaggcgaattataggaagtttgccttatacgcggaggattggtactgagtctgtcgatagctgtcgatagctgtcgatagctgatagtctcggggccttcggtgtcaacgctgattgatgtgctgattgtcttcgcagagtcttcttgtttttaagcgaaaatcgcaaggagaacccgcttggttatcgataggggaatgctcgccggatcgtttaaaagtgccaacgaagaggggcaaataggagattgactaggacaatagcaatcggaccagtggggatgaggaatgaaaggaaagaagacgcgatcacgcgacgataggaaggcaattggagaggtggatgagacaaggtcacgcgttgatgtgattgtctcgcctaatcacggaatgagttcgtcctccaagaccttgcactacacaaccgcttttcaggaggttttagtagccttgcgtggcgattcaactccttcgtgaatttcgagagcaactcacaatgattaggaatggccggagtatcagagggtggacaggtacaggtgacttttgtcgcgactagaggctagaggccagagggaacctcttgatccatgcaaccctcttctgatcggtcaaatcagctttgatatcactcaatccaattaggaggacaaaggaggggccaccgagccaccccaaacaaaccacccaaagggggttttgctttccatccatagaacgcggagtccgaggatgatcacggggctgggacgggtcgtcgatggcgttcgtcgcagctcccgcgtttcagcgtgatcgacgcgtcgacgagcggttcgacatgattaggtagaacaatgggtttgaccgatgacatcaccgtgatcaggcgaagtgtgtgatcactccgtcacatttgttgagtgatatggtgctgcatgtaaggaaaaggtgtggctgccatgcggatggcctgcgatcttgcgaagaacgtcaagatacctcgatcaagcttgtcctccttcgatcggtcagtgcagtgctatggtattatgttgccaacccactgtcaagtttgactatagtcttccttcactcccatcaaatatggaatggacggcctgaaatggtgcactaccgctcaactttagcgactatttgccccccctgaccatcttttgctttcaatatatcaacctatgactgtaataggcaagtccatgccacggccgatcacagagatatgggaaggttgtcagccaaatgggatgcggccaaactcccaccaccatcaatatcatatcggctaccctgagcatcgctctcgagctccatcgcccccaattttcgatttcgatgagaaaagttgaggcgaattcaacgggatatttgggacaccagggccagatacaccgtagacattcgtttacgcacgctcactcttcttgtcttaatggaggaggagtcatagctccgtagctcgatcaaaagcccggcgaatgcttgagcatcacacgggttcccgtacaaatgcctatctagcccttgcgcgagggttactggaatactccttgagtactccccgagcaattgcggaaccctcttcgatgtcagtagaaagccagatgttcggcaaacgaaacgagacttagcgttgtagagtattcggttccggtgccggtcactggatatgacctgttacgcatgtctccttcgtccggaacgctctgtcagcgccagtcgcactgaagaggctgcgcggaagtggctacggaagaggttcgaatgagccactcacgcctgctcaaaggtcttcggcacgttccgtctcactaccctgactaaagatctaagcgaattgccagaagcgcgtggtaccgcgatgcggcttcgacccttgagacgggaatgcgccttgaaagcttgactgcgaaaaagcaacgaaacatgtttcatcgagacggccgaagtccgaagtatccgctcgatcttcagccgttctgcatcacgccgcaactatcatatttcgatacgttccgcatggggaaaattctgattgattctgcaacttcagctgtacaaacgatctttgctccagggaacccctagggtaccctccgctcttggtatgctcaagcgcttggtctactcgccagacttgccctctcttttggccttggctttggcctgctgaatcaatgccctccgcttgatctgggtcgtcatgaacgtctgagcggttcccaagcacttggtaagccgctagcgccgcgagttcttcaccacgagttcccaacttacccctaccacaaagctgacaaagttgaaccagatgacccaggtctccgcgggcaggaaggtctgggcgaaggcgatcgaaagaggagaggtgatccacattgactgaggagagggagcgtgtggatcaggctcgcggtcaggcagaaggtgtgagtgacggaagacttaccttcaagacagtcggcaggcccatcttgacagtcttgatgatcgtatcagccgatcgggccccattgatgatggccatcgaagtgatgtagacagtggccatgacgggggtctgatatgaggtatcgagtgcagctcgtcagttgatgaaggcaagccgctagggtgctcgaggtgggtacctggatagacatcatcgctgcaatctgtcccaatcgagcgagggctcctgtccttccagcgaacatcttctggaaaaatcccacgaagaagtgcgccaggggagccgaaatgagtcctccataagccgacatctaatgtgtccacgtgcaaagtttagcctagcgaacgtagacagcagcattttcgattctcacctggagtgccttcgagctgactccgaattgcctcaacagtcccaacaactgaggagggacgaccctcctgaggttactgttcttggccggccattcttccttgggactaccacttgcacgagcagcaatgacctcttgcaagaaaaagagcacaccagaagtgacgatcttggtcttgagaggcttaacagccagactcgtgaggtacctcgccaatagtcggtggaacaaaggtagagccggaggttggatgggcccagaagtggaagggcggaggacagagccggtcagcataggcttgaccgctttggcagcggcatcggccactgcggacgtgtcgatgtggggagagaccttggattgaatagtagaagtagcggacatgatggtaggcgtgaagatgctggcgattggagcgtcagacctgaagacctctttagcaacgaagatacaacagttcagaaatgtatatcggacgccgtcgagtgggcacgccaggatcaccgcacgcagcgagcgatccgagggccgataaccgcggagatagccgaggtctgaagaaggacgcgtcgaataaccggagtccccgcaacgtctcaacctggtctctatgaggatacagcatcacatcgccctcttggcttcggatttgggctacgatatacaatcactccaacccacttcaccccagaatctcctttgtagcctcttccatctcgtagattgggaccccacatgcgaaatctcgacagattctcaaattctcccgggtgattttgccgttggcttggtccgcctcgatgccttcgacaatatctttgacgactgagttgcatttcgctagatctcgaggcgggttcgccggatcgatctgaatcacaatcttgttggggatgtagcgagtggcatggacggcctggactacggcatcggtaaaggatgaaccactttcgccgatgatcacatactgtaaaatcaatcgaatcggagtgcgggaaagtttcgaattagcggcaacgacccattgaccgacatcgcctgactgcctacctcacgcatgcctgtgacagcgtcataacctccggcgatagcggtggcaaagacgaagggtgcttgttggagcatcgcttcattactcttgaggatcctctgcgccttgtctcggtactcctgatagcggtccgagcagtagtgcgccaaggcgaaaagattgtgaacggcgaccgaagatgcagctggctcggcgccatcctgatcgatacatgcatgatcggttgcgttgtcagctcgtgtataccgatatgacacgtcagatttctgttcacctgcgactccttcattcggacgaggacaagctcatcttcttcactagcccaataacctccgttttgcttgtcctcgaaaagctcgtccatcttttcttgcagctgtatcgcccagagcagatgcgcctcttttccagtggtgctgtacattcggataagcgcttgaatcaagaatgcatagtcgtccgcttgagcggtctgcgatgggccgtcctcagcgccgaattgaatgcgaagtcttcatgtttgcgacttaccgggcctttgccctctcgccagctgcgaaccaacatcccggtcgattgatcatacattttggagcgaatgaatccgatggcgttttctgccagctgtcggcaacgagtagcgatagggtatcgcgcttctggtagagataccgctgcctgagcgagggcgttgatctggggagggactggtcagtactagcatcgcaatcatcctgttccgccacccaccatcagtccattccatgagaccatgatcttgtcatcgagatgaggcttaggcctgttcatggcccgccaatcccttagacgcaagattgatcgctgtatgacgttcttgaccgtgtcttcgtcgacttggtgctttttggccaactcggcatatgaaagggtttggtacagcgtattctgttaagcggagcttagtggcttagactactttccagcataacttggagacctcaccttgcccttgagctcattccgggcatcatgagaggggtccacgtttcccttaggcttgacgttccagaacgcagcagctattttggcgtcgtcgccaagaacgatgtcgaattcctcgtgggtccagacatagaaagctccctctagttcagataaagcaggcacggactcagttaggatgcgcgtaacaaggcaaaaacattgcatcttggcttaccgctctttttgtctgggttttctaagctttccccactgtcggcatcttccgcattatatatgcctccttcaggactgactagattcctggagacgtaatcaatgatgtccgctgccaagtcttcgcacatctttcggttctcctcttgtggggcgggtagatttgggagcaaggcaaactctagagcggagagggcgagttgggcttggtcgtatctgggcgcgacgtcgagagcaagcgagacttagccgatgataattagtaacgaatccgtttagactcacagcatcttttcgaaatgtggtaatcggaaggattcgtccacgctgtatcgagcgacaccacctcctacccagtccctaacacctcccttccacagtgctcgcagcatgtccatgcccatcacagccgcatggtctccttcttctcgcaccttgtcgggcacgtccccttgcgatacctgtgcggcgattcgggcaagaatgaccatgttctgagaggtcgaagggaacttgggtccccgtcgagaaaacccgccattgacgggatcatggtttcgagcgagatagtgatagatcttgtgtactgcagggttgactaatccctctaaatcggtagaagacgaaccggcctttaacggaaagtaagatacacatgtaagagagtcgcacgtctcacgccatcaatgtctcgaaagcttacgctgtcgccggcctgaacatctttcaactgttgaatgacatctcgaccgttctcgataaccatttctcggtcgtcttgccagctggtccaattagaataagagacattagttcacgttccacgacacgtcaggagcaccacatctgaatacttgcagttcgctaatcctgtccagcagccccataaatttaccaaggggaaagtacgttcccgcgaacacaggttcgagcgtgggcgtcaagactgcgtgttgcgaaggtggcctcagcgcacattccggcattgaacaatactctcggatacctacagactgacatgggccatccgcctccacccgaagtggcctgaagggaatgggttgttataaattcggaacctcaagtcatttcatatatttgcgcatgcacttgcctgaagataggtcatatacatccggtcgacgtcagggcgttcctctcgatcgacctttatgcagatgaaatacttgttcatcattgctgcgcaggtctatcgtttcgtgtcagcgaatcttaatgactggagcataagcaggagcttttcggctcacctcattcgagaagctctcctccgcctgcacaccgcaccagtgacaggtagaatatcctacactcagaaagatcatcttatcctcctgtttcgccctcgatatggtttgcggagtccattcctgccagtgcaccgggttcgacttgtgttggagaagatagggggaccttgcctggtccaatgcgtttcgcaaggggggcaggtccaccttgcctttgcctttgctgctcgaggtggacatgctgcctgtctattgatcttgacccgagtaagttattgttagtatcttgtagctacaacattgtaggctgtgggactatattaatggtcgctagcagcccaacctctaagtacccttaccgagtgattcggaccgtaagccaaaggtggaggctgacgaatctccccctaggcatagcgtacgccaagtctcagatcaaaagcgacgattcgaggcctcagtgttagagcgctgcactactatttccagggcagtaaaatacagatgaccggaccattggactgaaatcatgacaggtatttgggtacatcaagtatgttatttgaaaagtttcgaaagaaaacacgttcaaaataacatcaaatagcagatacaatgacctcgcgtcacgtgacaggcttgacgaggcaggcggaacaacatgcatcattcggcagagttatattcgagactggaatggtgcagaaggccattcgtttcgatgcaagatgtatgcttgagaatgtattgaggcagtggtgattcacgttgcgggtcagactgcttcgtcaaggtaagacgtggctctcgccttgtctttcccttttactggcgcagaagggaggtttcgtgtcatctcgaacatattatagcaagggcatggacagacggggtcccctgaagcgacatctgctcctagttgtacgcacgaggactactagcagccctcggtagctcattatcgatgtgatcaacgtcgcagagccggacttggttcaccgcctcgtcttcctcgatccaggggctacaccacctgcattagccatcttggcttcccacttctttctcctctcctcgaccgcgcttttgcgcgccttcttcttctcttgactcagactctcaggaactccatccgcgcggcgagagcgacgttcttcttctgccctcaaataggccgagacagtccgatccaccgaggcggtcaagctcaatgcttctgcaggttccgattgtaaagtggtatctcctgcggtctcttccacgcggcttgttcgtcgggccggatccgagatcagatcgtccagcgtccatcggcccaactttccctccccgaaactcttgaggagatacctttgcgcagcatctatatctggtacgccgcctatcataagggttcctaatcgctgagcgagtgccgtcaggagatcctctagcgcgttcgtttgtcctgtgaatgccgctgggagcggtaatccagggtaaggcgaggtctcggaggtgaatcgcggatggaggttcatccgatacaaaaggtaatcggcaaggatctccggagggaacaagctctctttgataccggctgtaggacgacccttcgctgtcagggggactctgcgtttcctcagttcgagttccactcacaggtcagtcccagtttcagtcctcgctccatgccttccactcctttccccagataaggaaccatgatccctgccatatcatacacataaacaggtggattctcgtgcaccttgaccgtccctgtaaatttccttgtatgtcctggcaaagatgacgtttggaacgctttccctgcatgaagccacatcatatcaacattcgagacgcgggccgagatcgagcgtgagactgaccttttcgtacaccgacccgccggagtgcgttgaggagtgaggactttccaacgttgggcattcctactacgaggaccttcatgtcatgtaacgggtcgaagttcctcctcgacacgtctgaagccagatgaggacaacgtcagtcaagctccgaacgagatcggaacagaggaagagaagttgtgaaacggggaagtgagactagggaaaagaggaaacgcacctaccgcatgggcaagaacttttcggacgtcccggtcactccgtgtgtcggcaaagaggacagtctgatttgtatgcttcttgaaggcccgtttgagtggctacccacagcagatacgatacaacatcagtgtcgagcagagtttgtgagagaaccgactgtacgagcggacgcacctcttcgaagcgctcttcagcttggtctcgtttagtgtatactaccaccttttccttgccctttccgttccatccgctcggtcccgccgtgctcatcctaccccagctctcctccaagacttcctcgaaagccgggttgatactcgtcaacggtaatcgtgcgtccctagcttcaatgacgagatcgatatccttgagtacggtagggagcttggtcaaggattttgacatgtgtccggcgaaccatgatggggtgttgctcgggaaagggaagtgaatccgggaaatgaaggccatgtcgattgagataatccggacctgatgattcgaggcgattattccgaatctactataccagtaatcttggcatcattcaccgatcaccagcaggccagcaggcaagtcatgccgttataacaatttcttgaattctaggttgtgaatacctgtacaaggtttggagggtagatctgacgaatatctcggatcgatcgatcgttaaggcaccgcggatacgagactaaaagtatggttatgtggagagggagggtcaccttgttcgcgtcgcccctgttgtcaacaaacgtaacctcgacaaacaaaacaatccagaccagccagtcctctcgagctgaggaatggggtctaccgttgacatatcataatcagtccgctattgctcatgatctcaagatcacataggaacgattcggcatccttgatccagcaagaaaatagatacactcagcgatagtttcggccgactgacttccccgctcatcaaccggttcaccctcactgtacagatcaagatcactcggacactcttctacgatctcgattcaataggtagttcaagaagcagatccgatcacgaccatggacgatggggctcctccgcccgagccggattattccttgatcccgcttcaagagcgatgcgtcgacaaagtgagttgctgatctactttcaagtgatatttctgagggaccacgaacctgaccacacgttattgcgaagaattggaaagcccgattatcagcctatactgagctcatcactaaattcagcaagacttccggcgacgacgattcattctttcgcccatacctgaactccgacctcttgcgatcatgggctacagataccaacgctgcggcacaggagaaaggtctcgaagcgctcggaagcctgatcaaacagtctggagagaacagcgcccggaccaggggggaggtcatgggtggtgtggtcgacaaggggtttatcagtgcacgagcggggacaaagagcaaagcgatcgaagtggctttactctacgtcgaggtggaaaacgatgggtcgggcgtggtggtaagtcgagcttgagcaaccaggaatcacagcggaagcttcagactcatcgtctgatatcggaaacagtctgacgtggtaagaggtctcgacgccaagcagccgaaattggtcgccacgactgtaatatgcctcagagagattgtcaagtatgtctcgcccggctccgcttctctgacacttcagctaaacgcgaccctgtcttccattttcgtagtgcattcgggatcaagcctttgggagacgtcaaagtgctgatcaagtctcttgtcaagattttcaaccacaatgacaaggctgttcgaagcgaggtgcgaatcttttcaccacagcggcatatcgaattgtgctgactatcctcaatgatatgacttcgcagggaacactcctcgcgcaagcgttgtatagatacctcggtcctgctcttcttccctccttgggagacttgaaaccggtgcagcagaaagaattgggagaaggattcgctcagctggacactgctggagagggcgcaggaacggggaaggcgacgagattgacacggaaggagaggagggccgaggaagatagagctgcagcgggatctgcaggcgtcgaagacgatgcgggtgagtccagaccctgatatacgaagctgaaaatatgaaagtataccgacctcaccttgttcgtcaggcgctgccgacgagccggaagtcatggatcccctagcttttattgaagccgtcgatgtcgtcccgctctttcccgataactttcacgaagtcatttcttccaaaatctggaaagaaaaggtcgagctcctcgccgagtgtgccaaggtgttggaggccaacccgaaagtcaaggacgttccagctctgggagacatcgctgcggcgctaggccagagaatgacggataccaacgtcaacgtcgtgagtgcgagtgccggggttttggccactctcgcacaaaccgtcgaggggaaagggttcggaaaatacaagggagtggttgcaccgcccatcctggacagattgaaggaaaagaagacgatggaagccttgggcaagacactggatgccatctttgaaactgtacgtgagatgtggcgagaggcattcacattcgagttctaacgattcgccaaacaggtttctttcgccgacattactggagactgcgtggcagctctgcaaaacaaaaacccggtggcacgtcagggaacgctgcaatttctcgctcgagctctgcaaaacacgaaggaggctccttcaaaatcggatctggacgttattgctccggccatagtagggcagctcggagactcgctcgagcccgtgcgaagcgccgccgcagaggcgctcggatctctatccaaaatattcggagaacgaccgatgaacccttacctggagaacataaccgacgcgcaaaagaccaaggtcgctgaagcaacgagcaagatcgaagtcaaatgcaaagccggagccaaacctgcgccaaagcctgcacccgctgcttcagccggtccatccaagcctgctgcgccaaagatgcctgctcgtttggcggcgaggtttggaggtgcgtcgaagacgggcgatccgccagcagccagcgaggagaaattggcagattcgacttcagttgtaccctcccgaccaccgtcggcaaactcggttacgagaccaccgccttcacaaccgtcaacggatgatttcggggatgctcttttcgcacctaccccgattaagaaagccggtcctcccgctcgattgatggctcgtgccgcagctcctcccgtaagtgaaaggccaactcctgttcaagagctgccgctgatactgccgtggacttattaggctgcgaagaagcttcctcccgcagccaagccagcagccaagtcgggtgctggcaaagccgctcccgcgcccgtatcctacgatgtcaagtacaagtttgctccagaggaagcgatggcaaaggcgagcgaggatgtgccagcggatattcaggaaggattcaaaagcggcgcctggaaagagagattagaagctgcagagaaattgacggcttggatagaatcaggggaaggtcttacgctcgacagcgaagtcctgttccggttcttgggaacgttaccaggttggggtgagaagaatttccaggtttcaaccaagacgtacaatgtcatggctctcctcgcgcagaagtcaccaacgttcggcaagtcttcggcggctcaggcgatcgcaccactgacggacaagctgggagacctcaagctgaagaagcctgctagcgaggctttgatcgtttttgctgagaagacgtccttgggttttgtcctgtctcaaggtgagcctgtagtgggacttgctcaaccagagcgacacgctcaccaaggcaaacaatccgtcacaagcctacgactcgatgatcaaacagaaggcaccaaaggctcaagcggacgcgttaacctgggtcaagcaggccatcgttgattttggtatcaaggggttggctctcaaggacgtcatcaacttcttgaaagtgggtctgcagagctcgaatggtactgtgcgatctagcgcaacggcagctctcgtaaccctcaaactctttgttcaaaccggtcagtcagatcggatgttatttcgtgtcaactgtactagactaaagtatctcggctagacctctcaatcttcctcgaggaactcaatcctactctcttgacgacgatcaatggggagtttgacaagattgccggacagacgccacctgagccgacaagagagagcgaagatctggccaatcttggggaaccgggggcagaaggttctgctggcgaagatcccatggaggatctcataccccgggtcgacttgaacaagatagtcgccgcaaccactgttctgaaggactcgaaaagcgaaaattggcggattagaaaggaggccttcgaagcgcttgaagcagaattggaccgaaacactaggcttaagccggaaatgggtgagtcgaaatggaatttgtggagggtcttacaagcgactaacgattctcttttcacaccctttcaggcgagattggtcaggcgctaaagctccgtatggacgacagcaacatcgctgtcaagctcctttgtctccggatcatcagcaagatcgcgaccagtatgggccagcccttccaggcctacgcgaggttatttgcgactcccgtagcgaatatttgcggggaccagaaggttaccaccaggaatgctgcgatcgaaacactcaccgcgattgcggacgcttgtcactcactggataccatggtgccgggctttgcttcatctttggagaaacccaatccggttttacgcggttgcgttcttgctttcatcgcttcgacattcgccaagtatccgcccaagagcgatctggcgtcactattgccctcaactttggcttccctggaggaccgtaacggagatgtgcgaaaagcagcgcagactctcttgcccttcatcttgcagagcgtaggatatgatcacgttatgggtcaagtttccaaactgaaaccagcctcgaagagcaccgtcactccgctcgtacaggccgctcgcgcttcgcttgcaacatcaacgcctcctcccatggagcccaagccaactaacaagccaggcgagccaaagccgaccatgagtcgcccggctgctaaatctgctctcgccgtgtcgaactcggcgccggagtccacatccccttcccaagctgtgtcgacgtcgacgtcgactgcgacagccactcctttgcggcccaaggtggaagccgtgagaccccgtggcatgcagatgaagaacaacgcactgagagctccaggtgcggcgcagccagactctgtagatcatcgcctacccgcaccgactaggtcattagccagtggtgcctcggttcttgctagacctacggtcaagagacccaccgctcaatcagcagagacccatcagcaggatctggccacagctgcacctttccacatgaccgatatcgcgcccaaatcgcaaagagaaaaacgagaccttgcaaggtggacctacgacgtcaacaatttgaatccgcttgtcgaatacttgcaaaagcagatgactgaccatgcatccagcgaggtctcgtctctacttttcagccgcgatcgatttgcggaaaaggaccacaccgctggtttgacaatcatcgatgatctatactcggcggaagaagacgcgacaccattcgacctctcccccgaggtcgcgcaaagtattcgaatcgccaacatggatttggctctaaagtatgccgggatcaggctacacgatggtagcacgcagatgatcctcaaatgtttggatctggtccaacatatcgtcgaatcggtcgaccgagccagggtcggattcagtgaagcggaaggcaacgtcatcttgcctgcgttgatctacagagtaagtgagaccttgggactgacatcgagcgaagtttgctaacaatcaaacccacgctcatttcagctcggagacaataaatacaaagacaagctaacggcaattttcggattgatcgaccgtactatgccagctagtcgcgtcatgcagctctacgtcgattatggcatctcctcgtcgagctcgaagacccgagctgctgcaatggagcaactagctcagcttatccgtagacgaggggatgttgctgcgtctgcgactaatgcgaccaagacttatcgaaggattgccgaattcatttcgtcagccgacagcgctactcgaagcgccgccttggattgcatcgcatacatgtatcagcatacgggaaacaatgtgctcgccatgattggagagttgcctccaaaggagagagacctgctcagaaaccgtatcgacaagatggccgctggatctggcccggcttcctcgacagcctcttcgactcctcctcgctctattccagcaaagacagtaccgaccaccaacatcacggcagagtctccaaggagcgaagaaggtgcctcttccaatgcgagctcgccggtacctcagagaaaggctgcagccttgtcctccaagatccttccgaacaacggggtacctgtacaggcgaggatgaaccgcatcgtttccggcgacagctctagctctattggctcccgaggcccacaagcaaagtcgctgactccatcagtcagcaccgctagtcgacaatcgagcgccgcgtttggacagggtggtccggtcgctcgaaacgctatccaagcgatcgaggacacggatcccgatgtcagcgtcgacgcgttgaaggtcttgcagaggttgctgacaacgtcgcctgacgaagtcactccatatggaaacgatctcgtccatgccatcacttccaggctgcaggtggtcttcagggacccatcgaccgtgaacgaggcaccgtttttccgcctcaccaaacacttgatacagaccctgagcaacgtctgtgaccaccctcacctcgtcgaggcaatcacggggaacaacttgaggcttctcattcggcatttgagtatcggattattgctgacagacaccaccgatggcaatctcaaggacatgtcgcgtttcatgaacatgtctattctgagactgttcgcgacgggccagcggatagccatatttgagtaagcatgatcagagctatgcgtaggtaatctgtaatactgacgtgcgggacttggcgctcatagtgcattgttcaaattgctgcaatcgctcgcgcttgacttgggaccagaggactctgagctagatttcaaggccaagcatgccgagctgatcctgaagtgcatctggaagcgatcccgtacgacagaggacgatttgagaaaaggcctcctgagtgaggaggacatctttactgtgattgaggagttccttcaagttatttctccgaaagaatggaggattcgtgcggcgaaaaaagtgcctctgggcgacatgccattgcgcactgtcaaagttctcatccaacatattatcagtgaggccatatcatctgttcctggaatagtagacagcgtactaatctctgccatcttacgtccagacgcattcggaaaggaaggagtcatggactgcctgaggggcatctatggagacattttggaatctacgcatgtgagctgatcgttttccttgtaaagacggcttgaacgctgacgcaaattattgcccaggtctatgaatacgtttacaagatcagtcagtctcagcatgatctattctcccacgaatggcgctgactgatgatgtctcgcccatagctcatccgaccgaagtatccgcgcggcctacaagcagagaaagccgcccgtcgcgcacggggacgcccgtcgagtcgcagccacaacctgtcgggtccgctgaaggagtcttggtggatgtcggggaggcgcctagtcagcctaacgagtcacggctatcaggcttgatcgaagacgatttggacgaggagctcgcagaaatgattatgcgagtcgcagcaccgggcaattcgaccagtgcagtgagtcggcataggcgaggccaaggtcttgcacgtcaggaccacgtgaatctgactcgctcttacgttctgccgacaggccaaagacgtcgggctgtttctacaggctcatccagaaaagcggggcaaatatgagctcatcgtggaagccaagctcggtaaatccacgtataaattattcgtcaagaggaccatcgacaagtacatccgtggaggggacgagagtggtaagtcaagagcgagaaagtccagatacggcatgatctgatgagctctgcttgtggccccagacgctgtccccttgtcgcccaaaaagtcgccccccaaacccgctcaaaaacgacagtcactagcccctggtcttccgattccagcagacgcagacgccgatactcggttggctatgctcaaagacaagtttcaattcctcacctccggcaatcaagaacaccctgacccataatacgacctagacgctcgttcacgaatcatatccgtttcgatatttctccctgcatgacgttgtatctaccttgatgagtatgatttggcatcgtttgttggacctttgaccggcttgtccggtagcgattggaatcggaatctcgatctgcgttgcgatggtgagaatagtcttaacgaagacttttctaccgttcttgtgcgatagtcgactgggctcgagtttgtgatttcggagcaccggtatcagcgtcgtgtcatcgaatcaggctcggtcaccctgcctcattactgctagcgcttggtctctagctgggacgtggctcgttggaaatcacctgagcttctttgtgctgtgatgcaatgttagcccccccggcttcaacgccctcgtagagcttccccgttatggtattaggtagatcgagctgctcgcgagacttccattatttcatccctgttttcattggaaatggtcacccgctttatcgagtcgaattctctttagcggtcgcatgttcagcaggtcaatacatgactgcagctgctttcgaagcgtcgatgaaccgggtgccgcccacgagaatatcaacctggtaaccacagagagatgcaaagacggcaacgattgtctagcggcaaggggtgactactgaacatcgagtagattttcagatcgttcgtgacctaaccctgatttcgagacgacgtcgggaggttcgagattctcggaaccgtgaggcagaaagaatcgaagaggtctggaagggaaattgcgtgtacagtatcggcgggacagtcgaaactctgccgtccagatcttggcaaatgcattgtcattgttggattttttttgcataacgggtgacgacgacggtggcgcccgctgcagatacatggtcgtcgaggcgacgttctcccttactccgtctcctgatctacccttcctatctatgcgagaccggcctccttcatggccttcaacatcaagtctccgatctgagcgggcgaggtggcgatcttggcgccggccttttccagagcctcgaccttggcggaagcggttcccttgcctcccgagatgatggcaccggcgtgacccatcctcctgccgggaggagcggtggcaccggcgatgaacgagacgacgggcttggggttcgatcgggtcttgttgaactgttcgagataggcggcggcctcttcctccatggttccaccgatctctccgatcaagacgattccctgggtcttggggtcctcgaggaggaccttgacgacgtcgatgtgctgcgttctgtgggcccgggacgtgcgtggcaggtgagcgagagtttgcgtatgcagctcggcagagacgaagcttacccagggaaggggtcaccaccgataccaacggtcaaagtctgaccgagaccggcgagggtggtttggctgtgggaggaacgctagtcaggaccggcctcgaatcagttgggaagacgaccaacgactcacttgacggcctcgtaagtcaagctgtgcaatcacgaagcgcgacattccgatcagtcaagcgccccgatgtcccgtgcggaccaaactcgggactcacgttccagacctggagacgattccgatctttccctcggtaaagatgtgtccgggcatgattcccatcttgcacttctcggcgatcataccgggacagtttccaccgaccatcctggtcttgttctggctcctgagggcgttgtagatcatcaactggtccctctgggggatcccttcggtgatggtgacgatcagggggatctcggcctcgatggcttcgaggatggcaccggcggcaaagggaggagggacgtagatgacggtagcgtcggggttctccttgttcttggcctcctggacgcttccgtagacggggagaccgagatgggtctggccggctttctacgggggtcgagtggggttgatgacggtggggtcagcttgtaggtccttggtgaggcggctagagctacacgtactgatgggctaactccacagacgtatttggagccaaagtccaaagcctgcctggagtggaaggttccctgtttgaccgagatgagatgcagtggacgttagcggcgctataggggactagcaacggaagagagcaacggggaagacgtacggtctttccggtgaatccctggaccatgaccttggtgttcgagttgatgctcaagttcttgatggtatcctcgtacgaccctcggacggccgacgaggtggcgaacgagcgctggcctgtcaaggacgtatacacattcgcccaggtcagcttgggtgttttacggaattacagtcggttcgtagagtgctgggctcaccggcgacggcctgggcggtagcttttcggagggactgcttgaacatgataaagggatgggtatgaatcggatggggaggtgaaggaggagagaagccgggggggtctgaagcggtgggacatgcggtgatgtttgtagtggtatagatatgtttcgaggtggtcgacctccgtgtgagtgtatggctggctggggctaaccggccgaacgtgacagtcaagggggaaacgcggacataaacgcataatcttcgataaaaacagtcaaatgtccgcttcagactttcttacacccgtctaccgccgcatgatcggtctcgccggaatggcttcgaaaatgacctcacctcgttgccgcacatcacaaccggaatctcactcaaagttttcgacagacaacgatacgaataggtaggtatcttttgggcgacggaaacgacaatcataggatacaacgggcagtgatgaccaacgcacgattccctagctgctgcactagctgacagagacggacgtgaaaacagactggacgggacaaacaaggacggggacgcagggtgaaatgctatgcagactgtaatcgagcggggcgtccgagtcagcgacgatacatgccgtgaagacacggacctggcacgcacattttgtatgggtatgagtgtgcttgttttgtatgtctcgcgactgcgtccgactaaggaggagcgatccccttggccttgagcgccttgacgacctcggcgtggagctagacagcggcgtgaacgtcaaacggtcaacttgcatgtcgacgaaacgacgcttgcgcggggagggttctgactcacgacgggctgatgcagtgcgtgaccggcggggatcatgggcaagacgtgttcctgcttgtcgacccaagcctcgaggaggatgggcttgctcccgtcgtattccaaaaactccttcatcttggccggcagatcctcgagcgactcggctcggagacccttgacgttcatcgattcggccagcttgacaaagtcggggttggtcatacgggtgtgcgagtatcgcttgtcgtaaaagaggtctgcggccgcgggggttccgtcagcgacagcgcgtggtaatacgacgacgacgacgacgtcgccgacgacgtggccactcaccttgccattgcaagaccataccctggaactcgttgttcaagatcaagatctgtgcgacgacaatcgcggtcagcttcgatggaacccccacgcccggtcggcgtcgacgccgacgctgggctcaccttgcatccaatgttgtactgagcggcggtggccatctccatggcggtcatggagaaactcgcgtcaccgtcgatatcgacgacgaccttttcgggggcggccaccttggcgccgatggccgaggggagtccgtatcccatggttcccaatccaccggacgagacccacgacctcggttgggtccatcggtaatgctgacaggcccacatctgatgctgaccgaccccggtggtgacgatgaccttttccttgccgatagcctcgcactgacggtcgagctcttcgacgacctcttgaggtttcatccggtcgccctttttcgagggggtaaacgtgaacgggtaatcggccttccacgatttgatctggtccatccactctttacgctctcggtattcgatctggggcaagagttcggccatgctggcggcgacgtcaccgaggacggggatgttggcctggacgaccttgttgatgttcttgggctggatctcgaaatggatgatcccgcctttgccctggagggcggctgcgcgcgcggcgggtgcgaacgaggcgagggttccggtgacacggtcgtcaaacctggccccgagcgcgatgatgacgtcggcgccctgcatggcaaagttggcataagccgacccgtgcatgccgagcatgtgcaacgccttgggatcgtgctcgttgaaggctcccagaccttgcatggtggtggtgacggggatgttcccgttggctgacaactgggccaagagttccggaccttcgggactggcgagcataccgtttccacaatagatgacgggtcgtttggcctggttgatcatcttggcggcggcctcgatcatctcggcgtcacccggggtaggtttcgacgccttgtcggtttggttaccggggagacgagggttgctaggcaaataaggggaggaccccgcttggacggatttcttggggatgggttgtctcaagatgcccgcggtgacgtccttggggaggtcaacgaggacgggtcccggtcgaccgctcgtggcgatcttgaacgcctcgttgatccttcgaggcaactcggcgatatccttgaccatgacgttccatttggtgcagcttcgggaaattccgacaatgtcggcctcctggaaagcgtcgctaccgatagcgctcgtggcgacctgtccgcaaaagacgaccatggggatcccgtccgacatggcgtcttgcatgggggtgatgacgttggtcgcaccgggtcccgaggtgacgaggacgacaccgggtttacccgtgatcctggcgtatccctcggccatgtgtccggcaccctgttcgtgtcgggggaggatgaaatcaaagttgggcgagttgtaaatggcgtcgaacacgggcaggatggcgcctccggggtaaccaaagacgtgcttgacgtcgtgtcggagcatcatttcgtggaagatttgtccaccggattggccgacaaagctgcgcgaggcgagccgagtagagccgaatcgagcaaggagcgtcgaagcaaggcgagccgagtgaagccgagtgtgcgagattcccagagcaagcgtcgtgtcgtatcgggtcgaaggaagtcggatcgaggcgagatcccgaatatttccatcaatttcattcgatttgattcgattggatgcaagagagaagaagaaaaagaagaggagagagagagagagagagagagagagagagagagagagagcgcccgagacgctcgagacgaaatccacggcggccgaggacctgtaggcgggtgggagatcgtcttcgggcaggtggacgaggagccattcgatggcggcctcgagcggggagaggaggttcagggagagggtcaacgggtcctgggtcatccgcgaagggcctgccgatgaacgatgcagtcgttcgtgcgcggccaccaacgccttgacgcacgagtcgacgtgtgccgggcggaatcccatggatttcaattgatgtgcgataggaccgggttcgagggcgtcgggcgtgttggttcccgaggggcgggtcgagtgggtcccctcggattcccttgtggcctccatgatcgccgaggggtacttggccatcatctgcgatcgagagtccggccgggcgtgtagcgtattccgaaacgcgaggtacgatcaagagtcgagtcagcgggggcgggtcgtgtaaagtaaatgcgttactgatgtacgccgtaaaattcgactactgaccttgcgaatgaccccctcgacgacctctctctgctgtacggtcatcttgacctctggcacgcctgcccagcccatcccgcctttgcccggtctgcctctcccatcatcctccctcgtttgtttccctctgacgacgaattccccagcgctcacgtcgttacccttgacgacgttgaacttgaactcggcctgcctgacctgttgctcctttttcttttcctgcctcgcgtcgacctgtttacgcgcggcgaacgggtcttcggcccattcccactcccgatgaggtggggctttggatttctctgcgaggagcgtggaccagtatggacggatgattggggggaggagcatggccattgggaggttgttacagaactgtcgagggcgtcgagcgaggtgagggtgagggtggtcagcatgatacggagcatgacggctgagattcggtcgacggtcgacggtcaagggcgggggggacctactctgaacaacgcatacgtagctccgaaatgtctagccagtgccggatcggtctgctcgatcggaggtacggggacgaacttgaccgtatcgaaatccgcgacgttcttgttcctcctctttttcagggtgaccgtcgaggtgtaggtctttgcgtcagcggcaccttggtcgacgttcctgttcgggtgggattcgacgccaggtcgttcccatcctgccttttgacacttttcgttcaagagttgaatgggggtcttgtaacctagcgggaaaagaggaggtggtcgtggtggaccatcgggcaggtcgtccgggttggtcgtaggtttcggtttagatttcgagctgttcccggcagatcccgacgagacgatgttacgaggacctttacgtgggggcatggtctcgagtcaccaagtctacaggtcgaattcggcgatgcgtcgtggcgcgaattatcgagtagcgagcaggtcgctcacccaaccgcctacccatctgctaacaacccattgctcttttgattttggtagctgttcgatctggaaatcgggatggttccgatgaaaccgtggaggaagaggatacaaacggacatcgaatataaggttgtagacgcacgcgggacacggacatcgatgccggcaagtcagccctttcgtcaacgccggcacgatacggtccggcgccggagactccgcgtcccgttcccgttgccatcatcgccccccggacggagagagcctcgcttgagtcgagaaacctccgagactttgcgccgattcggctcgactacgacccctatcggcgttgcaattaaaatggcggcggggctcgacgaatgggatcgtttgcaatatcaacacgcatctagacataccatcggatagtagtgtacaaggtacaacaccatccactcttgatcatcgaccacatcgcttcaaagacgaagcccgccttgcagcgcccccacttgcccccaacacaagacgtcgactaccacccgcccgccatgtccatgggagaagtaggcctacactcgctgaaaaaggcggcccagatcttccccgacgaacctcccaagaacgatggtacgatcaacaaacactcggcgctcctcacccaggatcccagtcggggaggcgttcaagcttacatgtacgccctcgggttgaccaaggaggatatgaacaaggcgcagatctgtatcgccagcgtatggttcgaggtgagctagcacggcgtcagacggtgaacatctcccgtcctcctcgatcactcactcacctcgaattggaactcgaatcgaagggtaatccgtgcaacgtacacgcgagagatctcggggatatcgtcaagaccggggtcgagcaggccaacatggtcggtttccagaccgccgtcccgggagtcaggtcagtccaacgtcctcccccgccctgcccgcccgcctcgtccgcgccgtcgtctgacacgacaccacatgactttcctcccggactacccgtagtgacaacatcggtatgggccacgacggcatgctctactcgctccctagccgggacatcatcgccgacgcgctcgagatgaatatcgaagcccaccggtacgacggtgcgatcctcatcccttcgtgtgacaagaacatgccggcctgtatgatcgccgcggccaggtataatcgaccgacgatcctcgtctacgggggagccatcctcgccggtcgacgaacgatcgactgtcccgccctcggtgccaaagccggggatccgctcaatatcggcaacctgcacgagagttatgggggcgtgttgagcggggagatctcgacggagcaacacgaggacgtcatcaagcatgcttgccccggtgcgggtagttgcggagggatgtttaccgcgaacacgatgagttcgatcatggaggcgagtccgagttcgagtcggagctcgtcgagcttgagaagcagcgagttgatttcccctctacgcaatccatctcgaacgcttgcaggtcatgggtctcactctcccctactcggcctcgatccctgcgctgtacccagagaaaaagcaggaatgcgcccgggcaggcaagtacctccgtcacctgctcgaaaaggatatcaaacccttggatatcatgacccgtccggcgttcctgaacgccatcaccatcaccatggtcctctgcgggagtaccaacgccgtgttgcacctcttggccgtggccagggcgtgtgacgtccaactcgacatggaggatttccagaggatcgcagagacgacgcccgtactcgccgatctacaaccttcggggcgtttgtaagtctggctcgtctgaccgaatacagcatcgacctcgagagtccggcgttgctaaacacgctttcgatgtgtttttttctagcatgatggaggacctacacaaggtcggaggcacgccagccgtgatgaaatacctcttggaagagggattcctcgagggcaacgtgatgaccgtcaccggcaagacgctcgcagagaacctctcctcggtaccctcgctcgacttttccactcaagaggtcatccgaccgctgtccaacccgatcaaggccaccggtcatttgaggatcttcaagggcaacttttgtcccggaggcgctgtgggcaagatcacgtaagtcaggagcgaggatcgcgtatcgtactcttggcaagcgagtcgttgaccgaacgctacccttgcagtggcaaggagggtacgcagttcaggggcaaggccatgtgtttcgaagacgagcagagcgcgttggacgccttgaagggcaagaagatgatcaagaacaccgttgtcgtcttgaggacccgaggacccgcaggagcgccgggtatgcccgaacagctcaagctttcgggagccatcatgggtgagtcctggccatcgtggtcaatgccaatgaccgccgtcgctcatctcgcccgggtatcgctcgatccataggcgctggactgagtcaggacgtcgccttactcaccgatggacgatactcgggagctagtcgagggttcctcgtcggccacgtcgtgcccgaagcctaccacggcggaccgatcgcattggtccaggacggtgacgagatcgtcatcgacgccgaaaagaacacgatcgacttgctcgtcgacgacgagaccctggccaagcggaaagaaaaatgggtcaagcccgagcccaggttcaaacggggattactttacaagtacgcccagaccgtttcggatgcgtccaacggttgtaccacggatggaagttagttgcgcggtgatgtacaagatataacacaaagtaaatgtatgcattggaacgggaccgcgtactgccacccgtgccgagaacgagatgctaggggtgtcatcgatacactcgccctttcgatataagaaaagtcgtccccgaccccttggtctagcaacgtattgaccacgaacttctgcatggcctcggtattgctatgggtacgaaggatgattgcatgtaccactgtgtggccaagtcattatctgcgccgaaccatcctggtcggttcatccacttcatcggcccacggcagtggtgtccgggataatcaactttgctcacactgctgagggatgggatgctgacatagggttcacaggaagaatgaaagatgcttccatgttttgaatggagctctgttgtatagcaatggactgacagacatgatgtggtacaccccttctctgtttttcacttggaaggtgtgcgacggattggcaacgctaagagactatgtcgggacgccagaacaccggatagcagagttacagagtccacagcaagtcggcaggttcacgtcagagcaggagctgaatgcgatcggaaagcatgtccgagcggcagcgcagttagcgtacggataccgtccgggagatcccctcaagtattcaaaggatggacattggccgatgttgggagatgatgctgcaatgcggtggaacccagagtcgccgtacggttttgagcataacgtggagcagaccgagaagttgattgctgcgtcgaagtatgtttacacgagtctttttgtgccatggatcaccgtatccagatgctactatgatggacaaacctcacgaagctgtcatgggccgtcgaatcctacgaccccgtcttcccccacccacatctcgaactcgccatgctcacgtttcgccactgtcgaggacctggcgcctcccgtacatctgaccaagcccttccaacaagcctccctcctcgccatctcccgcttgtacccctctccaccctgtttccaggtctctgcgagcgtgatgtcgggcctgaactgacgcagcgtggtgcttgggcccgacatggtgatgtgcacattcatgggccagtatcgattcgagcccgtcctgagtaccggtttggtaccgtcttgatcttgatctgagcgggattggaagggcgaggggtacggtgggggcagatgttgggcccaaaaggacgacccagcgtcaggtttccctgattgagggtggttcggtttccaaagactctggttggtgacgaggacgacgcagccgaagtcttttcgtaatctcgtcagacggtccatgacgtcgtccatcccgatgtcggacgaggaggcgatcccgccttgcccggccggacgagcggttctcgaggtgagctttcgctgatccttgtaccacctcgcttgccagtatggatctccaaagccgtcgatcacgacgagggagatctcaccctctgcgcgcttattggcgtggaacgtcaggtactgcagtcccgtacagaggcctgaccaaggtgacgtcgtcaaagccaggtcgagcccgtccgctgccggttggattttggagacgacgagcctggacaaggcgatccgtgtgatattctcgaccgtctctcgccgttcttgagcttgacccgaacgcatccccgccgccgagaaacacttgtcgaggtgcgacttgatccccgtctcgagcctctccagtgacctggccgagtccccgcctgcgtgtaccaacaatgctgcacgttgacccttgcccccgatctcgaccttgatcttgcctccgatctcgccccgggtatgtcccgcttcgtacgtgtcggggaggacggtgatcatgatcatgaacatgcagagcgacgtcttgccgctgcctgacggtccctgcacttcgacgaggtcgccccgttggagcggagagccatgtagctcggattcgcgttcgcgaggagggtcgtcggttttctgagccgagtcccgagcattccgagtggcatctaggtagaggtccaatttatggatgaatgtaggtcctggagcaaaagctgtagcgtcatcagatcagtcgaccggtagatttcagtgtcttgccagtaatgcagcaagacgcgatccgattgtctccctgcttactctcgtagcggacagcatctagaagctacgacgaaaggatattcgtcaagggtgtgatgggtcgatcgtcccgagtgatggcgcactgacctctcttcccgtagtcgactggaccccagccaggatgtcattgatcttgctggacatgttcgctcacatcacccaaacggtgccgtcgactttagatttcgaccatctgacagattcaaaaagcgttatgtgtgcgagatgatctggtggtgtaagatccaagtggaagtgaggtttgtctatagatctatatatctgtatgtctgtatgctagtatgactggttgtgttgatatcgccttaccctcggaacacgattcccgcatgaacttgaccgctgaccgacgcgatcgacgtggtctcgcatcggttagggcctagggcccaagatcgcaatcccaaatacatttttgcccacccaaacaagctcttgggctttcgtctgatgaatgtcgacattttactgcgggcacccaagatcgaatcgctgtcgaaaggttgttcacgtctatatctccgtgtgccgcttcccggctacgagtgcagactgcgcagaggccttcatctcactacgcaaatgactgtatccacttcacgctacgacagcgagcagaagactcggactttcacatatcgaatactttgttaccatacaatcaacccctagctttccggacctgaggaccgcgaacaaccggaagctgccttccttcaatccacgataggtagtctctgagtctgtctcttaacgaagtattcgatagaatacctcgcgccgtgagtcatgggctctccatgcaagaccccacctttttcctcttggtacgcatagtgaagagggtacttgaccatgacgctggagtagaagaccggcccgtctcgattggtaacgagagaacggacaacgccggcgagcctatctagcacgataggcgtaacgagggtgacgatggggtcattaggaagtgcacctagaagcgcgtcagtggctctcgcgacgagttcttgctgaagttgatcgccttggtctgcgccgtctgcacggagtcaatccgccattcacggtcaatttcaatactagtggctagtggagaccgtcctttcaagcactcacttccagccccggctacgatattcccttccaggcggttcagagctgtgagggcgctctccctcgtgccatgcgcctcattgagcaggaagaaggatatgaatataggcgcatcggatttgatctcgatattggcaggtatgacaacggtataagggtcgggcttgttatggacctagaagagaagatgagttgagcgcttttcccagagatgccctcaaaagcaccgtactgcctcgactcactttcgtccaatagggcacgtactccacgtgaacccgaccgtcatgaacgatccggatgagtgcatggatgctgcgtccacgacaaggcaaatcatcggcaaatatcagtattcaagggccagtcggtgaaaagggcatttgctgctgacgtatcatctcccatcccccagaggcgacgaacagcggtgtggtagcaccaaaactttcgaatggcgatttcgtaatgttctccttgctcaacggcaaaacggctgtaaacctgagtgagttacgagacagtcaattcattgcgcatcaacggcgcttgaaagtccgacagagaatcacatacactaggcatgatcggatctgataggattattgagttgtcgactaagttctcagcttgggaagctcacgctagccctcacgggtttgtgaatgagcaaatgaaacgatgttgagcgacgcattatatcttcactgagctactgcagcactgttcggatcaggcaatccattgatgtgtacttggagtctcggctgagctttgctaagatagttgacgtcgacaatgcccgacctccttaaccaaatgatcttggctggccgagctcgggtaagaaagcatccggccgatgttcaagaacagcatccgaccaggcttaagaaagcgtccggcccctgcttagctctgcacactcttgcgccatgtcttcgagcttacccgaaaccccttgcagatgcgaactctgactgggttggagttttccaaaggtcttctgtgatggctggggaccatggaagtttcccagaattaatcttgggtgcgggtgccaccacagcgcggttgattattcgttggcgaaatcggccagcccaggttcctactgcggtggagtcgccttcttgacccttttctttgcaatgacggaatgaggacatccataaatacaaacaagaaatagggtataatggatggtggagtggacataatctgacggatgggtcttccctcaaccgttcaatattctaggttcctcaacgactttctttcagcttagcaatcaacatcgctcgaacacacagttatggccatgatcgtcagatacaacaagcacaccgggaggcgggctgaacacaatggcatcagtaggttttagtccgccaaaccggtaagattccctcctggctaacggtatgcttgccttgcgattgcagattacgtcgatcccgttgggatcacccccgatcaggcggcagaacgcatcgcatgggcacatagtgctggcagtaacattagctggaggactgcgggagctctgttggctcagtatccggttattgttggcttttgttcgatgttgcctgggatgaacatcagtgccgccttgggaggcgcttgcctcaccgcgtctttagcgttgctcgcgccgaacgtgttgtatgagatcggcttccgcgcaggattggcgagatgggatcaagctcacggatatcaacaagtttgaccgcgtaagcgaaccctgatgcgtttctaaatgttcgggacatgactttaacggctgattatgtgatgctaggtccaagtaggctgagtcacgcgtgacctgattgtcggtcagggtcgcaagtcaagcaaagcgaaggagttgagaatcggtatttcacctggagagccactgcgtttgaagttttgcagctataaatgccaagctgtattcagcaaatcgagatggtataagatcgagtcagacgaggatttggccgagcgatagggcgttccttctcaccgtcatgccagaggtcccgccgattcgcgatccctcgcttcgtgaaagaagcttatgatggctactggcggacttgcaggtcgcgtagcgttatcctcgaatttaccatttggcgtgacccagctatcttggtcatggtcgtgacatggcaatggtcgtcatgactatcgcttattgattggccagcaacgttctgccgagcactgatacggtgactgctgcgaattggtataatagggtatgattttacagcaagagacacgtccaacgaaatctacgaataagctggcaaggtcataacggatcgattcgagacctctaattgtgatcatctttccccgccgcgacccctcccccccccacaccacgcgattacaacgcgcttgacgaaaggcagagacctgttcctaaaccacagtaaaatccggcgagcccttgatttccttcccgtcgatactgaacatgtttgtccagatggctgtgtaatcggggaaaacaagacgacagatcctttcaatggctagagtaagtattttgtttccttcctcaagcggctgccgactgacaagatgacccgcttctgatcgataccacggtagttgatacgttgtctcttcgggccagctcccatgggtaaaatgactccgtcctattgaggagaaacgctggtcagcccattgggggcacacgataatcggaatcgctattcaccgggtggaaaaatgcctccactcgacacaacttctcataacggcattgtgctccttgttgaccggccatcaacactggctgccacatccggttattaggcatgcattgaaatgcttgaatcaagcactgtgcgaaatcctaggcttgataagcagatattcttaattctcggctttcgaagcagacatacctctctattcggtagcctaactgttggcgcgcaacaaaacccgtcaatcacggggctttgagcgagaaaaatgacttggcgcaacgtaaactcactccgcttgtctaccttgatgcgaacatcggtgtcatgtacacgtttgaacaaggcgatcctgtatgccccaccgcgctgttgcctaacgaggttcatgttcccatacgtagcggagcaatacatgtcgcttgtgtttggtttatccgggtcgcgctttctctcgccagccgaaaagagagggtcaatctgagacaagatgtcttcgaaagcgaaaggacccggattgatgcaggaacgatcagggatccaggataccgctgttgccgcacgagcgttggaagccgaggcggacgtttgagccattgcctcggacgtggtctgcatcatcgactgaggcggaccttgagacaagacttgaggttcgttctgacgaaaggcgccattgtgagtgagagggtccgagtgggtaatccctggtcccatccatggtgccattgtcgctggatgctggtgttcagccgcgaggtatgtcgcttcacatggagtctgaaacgttgctaccaagggggccacttgtgttggagagaaggatggatcctctgctgtctgttgcataacctgaagttttcattgtcatcgataatcagccaggccgacaaggtagaatcgttcagaacacgcacttgctcgttagaggtgttcatcaattgactatggaaccaggcgctttggaaggcgttcagctggacgattccagggatgtctgatccgtagtattcattgttgatggaagggctttgcaggtctcgatagcaatggttggtaccggattgggtcgaagacgcaagaggtgttgccgatgagaaacccacgttcattggctgctgcgcgccctgctcggcagacaataagcccatgaagacttactcgagatgcccgcttttgggtttaccaagatactcacgaaatttcccgatggaagacctgccatgggaagagcgaaacggggatgattgaggctggtgatgagatcaatttggtccgactgtgactcgaccaaattggcgtttaaacccagcgttgcatcgtaacgagtttgggtgatgtcgggccattgagtggtgtgatttgcgagattctgatggtcgaaaggcacagtcggaacttgtttggaagacgttgcgtatggtaagaaggtcatggtagcttgctactgcaagttggcgttcgagtgccatctttcctcccttcagatctccaagcgtcacaaccgtttgtctctttgtatttatgtatgctcatgaatgaggggagactctccgcgagtgatcgatgaacgcttcttgtcctttgactggattgactggattaactggattggctggattaactggattggctggatcgactgaattgaaatgaggctggaccgactgaaccgactgaaccgactggatgaactggatcaactcgattgctcgctcgctcggttgggttgagtgacgaatctgatcgattttgcatccgccttcccgcggaatcaatcgtgttaatccgccgacatccggtgggatttgtctccgactattcggcaacgttgtcatatcggttcagcagccgatagaagtgcttgggacttggactcattgcaaatcccattccctcatgccgagtctgattgataaagtcaaaccaaaccaatcacgatggatcatcggccgattctggaccagcgggtcagatcaggggctgggtcggtaggtctacaagagaccttgtttgcggaatcagagagccgagcgcatgagcaagaattcaatgacgtactaggaatcacatccccaacgcagacttctggcgaaagaactccgccgacagccaaagagaaagtccctctcaccattcaacagatagccgaactcctctacaaagagcacgaggccgagatggtcacatggcttcccaccttcgcaccagaatcagaggtatactctgcttccgagccagtccttgacactcgatgctcggcgcaaacgctgacgaacaagctttacacagtcccgactacgttgcaaaggtaacactgaggcttcagggccagcctgcgattttctgtatgaccagcgagtaacgcggtcatgtcggggttgtcagctgaacgccttcgtaaaggcatacatcagcaaggaggttcattggtcagcgcaaaagggtatcccaccaaactctcgtgaagataacagacgttttttcgtggtaagtcatttcaactccatccgaggtcgatccgagcatatgctcgactgcttggtcttgtcaagggttgtgatggaatattgaataccacttttgccttgtgttttatgaagctggttcgactagttgccttgtttatccacggtggaacgttcagctcggaggattggactgagacaaggcgcggtctctctttacgcatttcaagtgtaaaaaatgttaccagcaagcctattttgacaagatccgcaggaatgtcacgaaggacttggactcaaggggcgagagctgctccaggtgtccttcacgtcaggaagccgaacaacaacagcagatggagagacaggcggaaattgaactaagatgtgagttcttgagcgctcgctcgaagcatttttattaggaaggaatccgaaataacccttcagtcagcgatgtctggcgagattcctgtttagtgcccaccgtaaatgctaatactcgattcacatcctattccagcgagatcagcaaggaagaggctgcggactacgtcgtatgcatctgacttggttgacctgggacgagacgtctccccattggtagaaccttccgtagctgttccgactgctctttcgcctctccaggcttttagcccgtttgcttacaatgcaggtttgcagggggatataccttccatcaatcgatgggtgcagcaattcaaggacgtatcttggaattcggcaggaaaactatccgtagctcacgaagtcggtcaaagcatggaacagaatgaagatgatagcgaagccggtaatatgattgaagatcgtaagtcatgcgagaacatccgagaatcgagtactgacgacggcaacagtttctacattcgtgctgtacccagaagacttcactgtcggagccttcagtccataccggctgagcgatgatcctggaagtgcggaacggatcacgatagcgaaggcggacgatgataaggacgcattcttctggatcaaagccggagaaccggattttgtagggtcggttaaacaccgaaaatggtaagcctcgtgctaatgcaatggcggcgtagtctaaatacattgccgagagacagttcccccgaagactgccctagacagtcgccagaagacatgtgcttgatatcggcccatgaagaggtggtccagcttagagacgctcacgcatggatcaagtcttttgtctcaaagcgccaggctcgcgccacccccaagagtgcatacatccttgcatgccggcatacacgtagatttgatgcgagtgctgcgagactctttccggtgtctttcgaagaagatcgatcgactgactattatgcctctatagctaacttgcgacttcactttgccggagggacgatatcaaatcctcttctatttccgacgcgacccactgttggtaggatgggatttcggtgcccctatgcaaggagctggaatcgagtcctacaaccgagtggcattcgctataggcaccaagatctctagggccgcacaatttgcctcgaagaccgcaaaagatgcgcaggcgcttggcagggttgtcttcgacgaccatcgtatcgagggacacatcgaagccggaccgggttggagctgtgggacctacgtcaaccaagaaatcggttatagaagcggtacagatacggcaaaagtcattggatcagacacgacagctggagatcctaaatatcgtcaagtgagattggtcattgcctttaccgacgtgcgacgcgacccgccacccgagccgaaagggatgttcctctttcacggagttcgtttcattcctgacaacttgaacgacgaatgagacccaggtagactcctatatttcagcactgagaaccctgccgtgactagcgcaaacgaagccctctcaaggtggctaggagatttgaacaaactgcttacactcatggacgtcatattgtatgacatacataaaattgatgtataactaatctttcggcctcctcgtctaccgaaaagcgccggccgacagaccaaaacgatatgcccgcccaagcggggccactgtcgaagcaacgagaattggattggacatttgtttatttatctaaatgagccaatatcgcataagagcgatagtggcacaagagctgcatcggtgcgcatacgtacaggtttcagggtgtctagcaattatccaggtcgttgcgacctaggcgggttttgcttgatcaagttgatgaaggccggtccggcaaaacccccctggcaggccagatctcgaggcgtttcccgcttgttcagtgttgcgagactgattgaatggtacgccttgcgggtacagactcacaaatggccgtcacacacctgcgattgccgacagagattgcggcgtggcatacgattagttcttcacagctcgtcattctcgatgagcgtccggacgcaaggtcgacccaaagatcaaacgccttgtattcgatcgtttgaccttccgacactgatctgtatcaccttcagcccgcgatcagatattttgatgacgcaacttcggcgagagggcgcggaccttgatccgatcgatcagaaccccaagccaactcagatctcggcgtatacccgttcatacgtgacatggcctgtaactggcaaccaggcggcatgtcataactcagtcggctacactccgattactgcgagaaaacaatgcgatcgccatgtcatccgcgtcgccatctgattacgccgcttcgatcagactcagggtacctgccgagctcgcattccgcacgatcgcctacctcgaatctcaatcctggaataccttcacccccaagatcacccccaagaccgcctcgacgaccggctctgtcttcgagggagatccgagcgacgtccccttgtaccccgtcgacactccgatcacgatccgggtcgagacgttactacccttcccgatcatccagcgagaacggatcacccgctgggacgtctctcaccgagaaatcgcgtggagtcaggccgtcttgcctcgatggttgctctggaccgatcgaacgcagaaggtggacgagcacgaggatggacgaggagggtgtgattatgtgacgaccatggtgagcgggaccccttccggatcgcctgttacagactgccgactcgtctgacacggcacggcacggcacggattcccgaatctagacgttccgaggtccgttggccccggtggtccggttctttatgggtcatcgtatcaagctggctctggatcgtgtggcccatgaccttcagaccgaactcgaacggtgaccgttcgtcgcgtcgactcccggtagttatgacgacatcggcaagaagccgtaagacccttgacgaacgaccatgacctcgaccggaatctaccgaaatatgaatatgtgatacgaatccacccgcgccccctcaaaactcgagctgaccgtcatacgcccgacatctccaagggtgtacacaaacgggatctttctgtgaatcgccccacaaacgagggtatgcgagagtaaatgatttgttttgcgtttttttctccctcgtcttctcttccgctttcttccctttcttgccctgtcctcctcgtcgacgccatgtcaaagacgagtcccggaggacttctcccttctcgacggctgacgaaattcgaactgccctgcttagaagactatggcacggcgaaaacgtatcagcccggacgccacgagtaaaccggccgacgtcttggctcgactcactcatatctcccatcgaggcaccttcgggcgcttgagtctccctcatcccgatctcccagtctacgtacgtgcgtttgcggtgaaaggacgacgctgttagcctcggcccggcggtttcacgatgggcacccccgacggaactcacagctgtagatgatggtgacggccatcaagatccccgtcccgcttcccaacgcgcccatcatgtcggcagtgaaactcaacaatccgagggtggcacccccgaacgcggcggcggtggggatgatcctcttcaattccttgtacatgctaccctctcggtgaccggcgatctccatctgttgatccttgagctgtttggcgacttcccgagggccggacccggagacttcgatccaggtcttgctaaagatggcgcaagccgagacgatgaacaggatgtagaggacggtgtgcaacgggtcgaggagggccgaggtgatgctcctcggggctgaaatgtagtaagcgagaccggacacggcttcgagttgacccgaggcttcttccatgggctatacacgacaaaggatcgaccatgagcgtcggctcttggcaccccaggcgcacatgggggggactcacctcccaaacaccgagaagcttgacaaagaggttgctggggaacctcgcgaacaacatctgactgacgagaaagacgttgctcgtcaacgcgctctcgagcatgatgggcatgttgctggtgtaaaacaacttgatcgggtacgcgcccctgacccccctgttcttggcgctcttgacggggatctcgagtcggaacccttgcaggtagatgatggcagcgaacacgagcgcggtggagagcaagttcataatgttgggcaacctctctcggtaaaaggcttccttcaatccgcgggtcttgtcgttccaggtgaacatgatgtggaacagggcgatgacggctccctcgaattcgggtccacgtccggtattgatcgtcctcggggaaaacgccttccacacgatggattcgcaaatgttggtcgcgatgaacaggttgataccggatccgagaccgtaacctttggacaagagttcgtcgagcaagaggacgatcgaggcggcggcgacgagttggaggatcaagaggaggacgacaccggcaccgagagaaccgggaggaccgtacaagccggtcaagacgtagaccgtagcttgtccgaaagcgatgatgagggcaaagactgtcgcggcgtcgggtcgagatcagcgagacgcctgcctgctttgccgacgctggactcacgtttctgagcggcgctgaacaagaccctatcctccttgagcgagaaatccacttctaccaattgcgccccggccaacaactgcatgatcatcccactggtcaagaccggcgtgattcccaattccatcaaggtacccctgttggaagcgaggatgaccctcatccaatagagagggtcggacgagtccgagctcatgatcccgtagaggggcacttgggacatgacgagaaagatgagcagggtcgtcgctgtccacaaggccttgtggttgaacgggatcttgcggtcgggcggggtgacctcggggaggatgcccataaagggtcggacgagctcgaggaagcggactggcaggtcgagtcgagtagggtcggttcgagtcgggtcgggtcgaggttcgggaatgggggttgtggtaaagaagggaaaacagagacatgatgcggtgttagcctgctatgaatgtcgatcggggaggaatcccagaagaggaccgactcacaacccatcttgagcgaggtgggaacacgatcttttctaccgagcgacttgcagggggtggagcggtgaggggaaaagcgcagaagagagcgacaaagatgggaacggcttgacctggagagataaagaggaggtgctggtggcgggtgccaagatgttgatgggggggatggtagaatggattgctgcgaggtggtcgaggtccgggtcgaggtcgaggtgtgtgtcgtgtcacgcacatcgttcgttcgagagagggagggtcgagctcaaaatggacgtcgcccccgcgcgacggaagtaattccggtagatacatatcacgtcactttttacgacacaacatccatcttacgacatcgcgttctcggcatccccccccctgccagctgccagtcatcttctcctcgaaagcgcgcgacccgggtaaagacgatcgcgctacgttcacgaagggttgagccggggttctctcggtgagaaccgggagagacggcggatgcatggggaacggggaatgacgagaggcacacggggacggccacatagccagccagcggccacagaggaatggcctgacatggctatggaccgtgatcccgcggggaattacttgggggatcaggcaaggccggtgcccgagctgcttgcgagtcgtcaaggttgcaagttggggggggcaaacgtcgacgatctcgagtcgcgagtctggcccgcaggtgtctggctgactgactgtacgttctccagtgtgtactctcttcctctctcttggtatagatgatgagcatcgaagtcgtcgtcatgaaatcacgtcgagtttcacttgatactctttcttttgcgtaatccccctcccccccaagcgagcgagtgagtgagtggatcgatcgcgacctccacattccaccaaccacctcacctcgacgatcgttccatacatcttcatcgtcgtcctcgtcgtcgtcctcgtcgtcaaatcatacatcatcaccaactctaggacctaacccgacatagaaatagacatagaagtctgagcaacgccccaccacccagttctcgtcccatcgcttcaattcgacaactaccactaccgcgcacctggggatcgcgacccctcactcgtatctctaaaggatatccactcgtccaggcttatcgctcatcctttcaaccttttgagaccctcgccacacacacacacattctctctctttgtctttcttggcaagacacgtcacgtcgccctttgatctccttccctataaaggcacctctctgcaagaagagagaagcaaccaatcacccttttcgaggcgaccaaggacttttacactttgcgcctgaagctcgagctggggctggtgctgcacctcgagggacattcagagatagacggacgggctggtcgatcggttatatagagcggaatcgaacgaggagtcgagaccggatcgagtcgagtcgagtcgaatccaggaattagattagggaaacaagcaaagcaaagcaaagcagccgaggtacccgatctcctcaacgtcggaacgtttcctgaagaaggctctcgtctagcggattatcgagcggataggacggatacgggttcgagatggtcacgtcaatacctccccggacactgaacccggatcatcaggtcggaacaaagtctcaagagtctgcgctctcacctcgaccccatgcgcactcgcactcgcacacgcattctcattcacaccgctcgagctcgacctcgacctcgacgccgatcccgtcggccccgatctggtggtccaacaccctcttttttctcgggttccacctctttgcagcttacggggtcatctacctctccccgccctcgtcgatcgggtggcagacatgggtcctgtgtgggctgagttggcaagcggccagtttcgggtgagttcgatcgtctcgccctcgtcacaaggcgagggatctttgacggggatgaggaggaaaggctggatcgctcatcgtcgagtcggggtttgcttttttcgctttcgatcttctttcttctcgatcgggtatgcggatccagggtgactatcggtaagccaattcatgcaccgcgtcggcgtcggcgtcggcatcgacatgatgcgccctgttgctgacgagatgatctaccttgcggcacggacgtgtagggtatcaccgtctctggtcgcacaaggcgttcaccgcgaccatgcccctccggatcgtcctcgcgtggatggcctcgctagggtttcaggggagcgtcaagtggtgggtcctcaggcatcgactacatcatcggtgagtactggccgttcgtcgtcgccgtcgtcgtgaaatcggacggtcggctgagacgtgcgtcccgatgtctttgtatgcaggttcacggacgacccgatccatgatccgtattcggcgacgcgggggctctggttcgcccattgcggttggatctttaggagacccaattacccgcggatgaagctgatcgaaaaggacgacctcgagtcggatcccggtgagcagcctgtagtcctagtcacacgaagctagaccccgctcacgaatcgtcctcatcgccgtcatcatcccgtcgctgccctcgcagtcgtgaggttccagcacaagtactttgtcccgatcgccgtcttttccggcttggtcctcccgaccctcgtcgcaaagtacggctgggacgacgccatgggcgggtacgtctggggaggattggtcgcgaggctcttgatctggcatacgacgttttgtatcaattcgttggcgcactggaccgggttgcaaccatacaccgaagaggtcaccgcgaggggcaattacgtgagtcgcgattttttgtcaaggcgcgggaacaaggggtcgttgacgggagagtgtcgcatggtgaataggtcttggccctcttgacgagcggagaggggaatcacaagtgggtctagagccgtgctccgtcaccctcccatgctcatcgtgtgaactcgcttctgttcgcagtttccatcacctgttcccctcggactttagaaacggacctcaccctcagtgagtcgtcagggtccttgtctctccccccaacgtctgacctcgaccgaattctcacgtgcactctttacctgccttgtagggactgggatccgacgaaatggatcatctgggcgttgcacacctacaccccctttgtgcccacgatccgacggacaaaggacgccgagattcacaaggccaaggcgcacgtccatcgcctacaggcggaacgattgaccgcgctcgtacccgaattggaaaagagcaaggaggaccacgagttgcccgtctggacatccgaggagacgtcgtctcgggcggccagcggccaagcattgttgttgatcgacggctacatcgtcgacgtatcggactatctggacgagcatgtgagtcgtgcgggtgcgaggcgaacggggcgaaaaggtgtctggctgacaatggcgcttttcgattcgaacagcctggcggatcgaatcttctcaccaactggtccatccgagccaagaactcgtccatagcggtccctcaagataccgcatcgcgttcgctaaagaaacgatccgtccgatcgccgtcgtcgatcgactctgggtacgaatccctaggaacggcctcgggagattcttcccctactagcgaccgttcggcagacgaatcgaccgagccccacttgcagactgcgatccagaccaggatattcaaggacgctagtcgggcgttctttggccagatcaacaaccactcccaggccgccaaggaaaagatgagatgtcttcgcgtggccaggctgagcacgtccaatggacgtgacgacgaggacgacggctaaaagagccccgctagactttccggtcatatactttaaacatgtacacacgcatataggtacacacccccttttgccttacgatcgactagatgagtttggtcttccttattgctccatttccgtattgtaaggccactgtaagctcgaaacgctcgctattcgttgttctcgatgggaaagaaaacgtccactgtggcatgatgtcgtgataatgttggattacaagcgaaacattcgtctggtttcttttgtcttcgatgatgacgcggaatgatacaagtacaatacgtcaagaattcctgtccacccaagcccgttcgggctctatgtccgtggatcactgttggtgatacccagtgttaccctgagcaatcatccgtctagaaagggtcgttcgcagtggtcagatctcgcttggtcattcgcgccccccgggtcggcgaccgactcacgcgcgctcagggttcatgccggtcgcggctggcggtcgaaatccagagggcggagggggaggcggtactgctcctggtggtggcatagcgggagggtatccataggggttggcaccgtctatgatgatatgggatcaggcactctgtcatacatcgtcagcaagataggcccgacgtacggagcttaggggtcccggagtcgtctacagttgatgcaaatgagcgatctgttagtggcaccccttttacactgggacaacgaatctcacaatgcatgtcaggcctcatgaagggcgttcccatcccaggcggtcgaggtgtcatgccaccgtaattgggtctcatcggggtggccgacccatacggcgcaggtatcgaaggagtacccatgccgggaggtcgtaccagcggggtcgagctgccgttggcgaacgcaggtatcgaatgcagaggagtgcccatgccgggaggtcgtggaggctgtccacctggcgtccgactaccaagaggaccaggcgttcggccaccaccgaacggcgtcattccaggtactcgaggagttcccacaagttgcctttggctttgcagcgtggtctggtattgcgtcttgaaagcgttgcacaactcggtcatcccaggtagttcggcttcaaacagcttgtaacacttcggcgtgaccttgacaggctgcagaaccagtttgacacgatcagctccacgggtaatccatacaagcattcgagacgggaccacttgcccatgtctgcacgtcacctcttgctcggctgaggaatgacaacttgacccagccaggatgttccttgtcaagggagaacccatacgccgaggatccaggtcgcgcttgcacctgattgctcagccatttgtctacgcacatcagccgagccgtcgttgatcagctgtgccttccgccgcgtctctgaactatagggactaacccaactcgttttcgggtcggtacttttcatgctgcatcaatgtgtccaacctccgggcaacagctccgacatggttgacgagtagttcatccaagtccgtgtatcttccgctgtctttaatatttaggacagcgcccaattcatggtcactgggcttgttctcctcgtgcacgtctattcgccccatcgagtgtattgagttgcaatccctcgcgtattccgtctcacaaccaaatgggcttaccgatgtgctggaagattccctctgcgactttccaggtcacggcgatatgatccactcccttagacgatggcctgatgacggcttctccgaccgacttgtctgccaacatggactcagcttgggccttgttgacatgtttccaggctggatgatcgatgactctcggtaaacccgcctcccggactcgcttctgcttagcctgaagttccttgtcgattctttcgtgctcggtatcgaaataaggatctcgattgttgaagagttgctggttggccgccaagatgacgtcaccatgccggatcgacaattcgatgtacaagtctgctgcacgaagatcgattacgactcctcggacggcttggctcttgttgagggcagacttggcatcgtcgatgacggctggagggtccattatgtattcccgggggatctcgcccgtcactccggagtcgagtctgatgtaggcgacctccggcttgacctgggtcacatgagccgtgataatctttccggcgtcgagcgtctcaagcgtctctccagtgagcattcgcagtacgtcatacgtgtttggcaaagcgaatggctctctcgtatcctggtatggttcaacaatctccctggcgatcatacggacaaggatcctcgaactcttgcctgtcctgcgcgcaagctcgaatgcaaatgcctccaggtccaaagtcgcaagtttacgttccacgttttcgtcgttccatagcatagcgacagccttggcggggttccgattctcccaatcctccggatcgagcccgagcacattttgaacgagctcgtgcgcgatgggatattcggtagggtggatgcgcgtgtggtctaggggatcgataccctcgtccgctttttccgaaatctcgttctcgaagtactgggcttgaggaatatacagcgaactgacggcattgacgatgacgttcgcagacaggtgggactggagaattagcgcactacgattcactagcgacccgccctggagaatgtgttggtatcagatcgcgatcccgcgctggcctttactcagcgtgcatctcatacctctctgatgatgctctttatcagagcctcggccttgcgcggaccgagaccggcaacgaatggcaagagcttttgcagatacgggtctttgacggcttgattaatatccacaccgacagcattcaccacgttcacaagagcccgttcaaggcactgcagaagacgctcttgcgagacctgaaaacagtccgccgtgggtcaattcgtaaccatctggtctgggcttgccattggaagctacttaccagcgcctgttgctttgggacgtaggttacagcgacaagatcagaaccaagagcacaatattcgttcaacggatcttgcgtgaaacgagccagtccgagagcgtatcgtgcattggcaggccaagcgggattttcttgcgttgctcgggcggagttcatgtagagtctagccacttcgtcatgtacgtagatcagtgggatctggcgctgtgacaagacgtccatgtactcctgccctgcaatgccagagatgccttgcatcatgttcgagcctccagcatctgtcgccgcaatgtttttaaggatgccgtccgcctcgattcgtagccgatgtgtttcagccgtaaagccaccgatgacgacgacatcaggcttattctccttgacaaaggtggtgaacgactcagcatcctcagtagcgcccaacccatcgaacttggcctgcgaattgagatgtcccttggcgtccaagaacactgccatgaccgcatctctgccgccactaccgaaactgatggcgagaacgctaacagagctcccatttttgcttccataaggccgcatgtcaactctctggaaacgctatcatcagcattgtcaaatgtgcagtagggcgaggatcggatctgaccttttccaactcgtcctgacactgttggcagatatcatcttcgcttgtctgcttcaagtcgtcctttaaccactctgtagctttgggcaagaggaacgtcgagaaagcgtctgagaccacgctttccttgaaagccgcccaggcttctgcaagttcgtctccatcttcataatcggtaacccacgcgtccatcaccttcctgaaaatgtcggtccgggttttctcgtggatctcaaggtggatcgtgatgagaccttccgcttcggccgccagcatctgtgtaaagatcttgtccctcaagatttggtccatgggcttttgcttgaggtatttgaagcgctttcaccatatccatatacgtaagcattggctcgcccacgtgtacgtgctaactgattcgtctcgctcacatagtacatgtgcagctcgtcgatctttgcttgtccctttgctgtcggtgtgcaagagatggaggccgagcccttaccgtaattgcggaccatcgtccgtaacagtgggtcgcatccaaattcctgaactaacagtcgtttcccggctggcgtgcaggagactgaactatccgttcagatggacgaaagtaggtcgacatacctttaagaacatcttgactagatttgtatgtctcgccaataaattgctcggccagatccgacgggaattgttccgggttcgatcgtgcgtgtgtctggtcgttctcgctgacccaagtagcgaccatcgaagggtttccgattttctgcaaaagaagcaacacgaggggtaagtgttgatgtggaggtataccctctaaaacacgaaaggcttacttccacaaatgctgcgatcacgccttcgtgcttgatccgtttcgaatgagctccaccagctcgcttccgctcgagagcctgtccttcagcttctctcacggcttggaccagctgcggataacggagatcgagccactcgagggcctcgtttccagcctcgatactgtcgctcgcagtgccgtctggtaccgcgagaaccttctgctcgaaatactcgtcgctaaagctctcatcgaacctccgcatagcttcatagaggttcgccacggcagcccgtttttggtggatcgcccgatagcgcaaacctaggtcgtagcacatccagagatctgctttgctgagcagcgaaaattggcccgatgcatcgacaaatgcgtcttgtcggtgtcgtgcaaggtatggcacctccagattctcctcgaacattccttggagggcggcttgtacagcggcctcgaattctgccttgatcgtgccggcgtctcggatatcgttctggcggaaacccgagaaggccatcgctgcagacggactgatcctgggggagatccacgaagtcgccggttcgatcggtgggaagtccgtctcgtcggaatagataggattggtcgataaagttgagctggagaattggaaccgctccgggcgatcttcctctcggatacgctgatcgataggcaacaagaacctgtccgcgagttcggtgggttcaaagatctgaaggagaaatgagcgatcagcaagatgatcgccaagagctaggtgcatgagactgttggccgtacatcgtgcatcgtgatcccttgcttctttgtcgccttttcgtcgacgtagagagcatctgcgtattcatctccagctccgaagacatcttctagctccgcacgggtcctgtgacgatgttctgagaatcaagacctgccctgtcaaatatgtgacatgcataatcgcacttactgctgatccgcaccggcatagcttcgaactttcttggcatttgctcgtttagcctccttcttctgtcggcgcaactcggcacgagtggcctcgtccatctcctcgtcctcgtcttcctcaataaagtcgtccatgtcatcctcttccacctcgtccattcgaccgttccttgaattagaaggctcattaaacatgtcgtcgagtgctggtcgatcgtcgatcgagtctgaagagtctctccgcttgtgccgttttcgatcggaaccgtcatccagcggtcgacgagccccggtattctccatcaggagttcgagatcatcctggtcgaggtcaacttgagctgagaaagatattcaacttagccgccttagtccactcgaggcgtagttttgagtattcgttcagcctacctctctttctcttcctgtgcttgcgtcgttttcttcttttctcctcgggattcatgtcatcatcttcgtcctcctcgtcttcgtctacgatgaaaccagcgcggatgcgagcagcctcttcctcgtcatcttcttcctcttctgaagagtcgtgctggttggggtcgccgtgcatacgaatgtcatcgccgccatcgtcggattgcgagggagcgggagacgacatattgatgggatttcgtctacttgaaactctcacaatgaatcaggttcaggcgtatctgtttgttcagcgatttgccaacaggtcacagaacacgatttcgaggccctcgacgagccggtagctagctggttcaacttgatagtagcccttgaactatctatcacttaaagcagtagcgcagatttatgacgcgtcttttttcgatcactttcaaaaaagaatccggcatcccccccccctcatggactatctctataccctgtgatttcgtttctgatcgagccgcatcgtgttctcgaagctgtcagaaaatccacctgtcgctcatccgggcaactcgccggtccagtcccagaaattgaaatttcataacatcacagcaatacctcatcatatctatattagcaaacagcagcacttttcggcatccatcaaccgttatacaaagccctttccatatacgataccgctgccacacgttgacaagaaccctaccgcagatctgcctgcttttcgtacatgccttgttgctgcttgtcgtgccccaatttggcaggctcgtccgtactctccagaattctgccatctgcagggtttacggtcactgccattctctccatgtgatactcgaggtcctgttgagcagagcctggagcttcattgagattgttcgcatatgctggaggttgggaaccaaccgcgatcataggatctgatgcggaagcatattgtccctcctgtagcctcctgttctcgatctcgtcttgtttgagcatttcttggtactgctcgtattctcgacgttcgctttcgtccatgtcactagtaggaaatccgcttgcgggagcgggctgggataccgaaacttcgccatcctcggcagtcgaatatgtagaaacgctcgacgcattgctctggaatcgtgctggcaagggaggagggactgcccgtttaacgtcttggtttgcaggtaccacgcggttcggagtgttggagcctgacatcctacggatctcggtagcatgagggtcatcgttcccccagtccggatcgaccatgtcgggcgttggaggcaacttcaggacctcctaggatggtccacaccttcagctcgagtttctgaactggacgacccggctactttcactcactccttcatgaagatcaagctgatcgacactactcggctcgacgtattcgagaccgtctcccttctgaagctgagctttcccggtctcggcatctttcaatgcctccatcaagccggctgcttcgcgaggtacgcgaaccttcccagtcagctgggaaatagcactatatttagcgatcggatagtacgcccggtcggatcgctttctgctcacaatatcctgggcttttacgcccggccagtggtacatggcggcattctcgtcaaatcgctctgcgccaggtcaaggcgttgtttagcttaatatgctcccgtacaagagaacgggcgatactgaccaacaaagacctgaccaaggatactgattccagcgtaaagtcctctgctcttgacgtagctgtataccggagccctttctttaccgctctctacaaccgcacctgcaccgaactatcgatttcccgatccaggggtgagcagtgtctccatgacagaactatgggatacgctaggcttacaggaccggcaactactccgatatcagcgcctagtgtggccttgtgtccgtagaacgtctccagtgccttttgggtccttatgaccactgattccagaatcgttgcttagggatcttcgctggactaggcaagtagagtggattcactgaccaactgcgtcaaagatatcgactccataaaccaatccagcggcatagttgttcggactgatagagctcggagcggaccaagctgaagtgatatatcgtcagcattgttgaggcgcttcaacctgtccgcggacgcttacatccatcaggcaatcgagccattaccataccgctacctccactgccaccaaacggagcaatggcggtcctctgggtacaccgtgtggaggccagagagggtgagccgatcagccgctgcctaacaaacgcgcccgcagcctggaagactgacaaagttggtaaagatggccagtcccaccgcttcctgaatgactttcgctgggattttacgcaacagcttgaccggcttctttgcctctggtttttttttttgaagattcaatatacattccggcacgggtcaatgcgacgagatatggcgactgactcttcttgggaacgtcttccgcctcgttctcgacttctggcaccacttccgtagggatcccctccactatgtgcaagtttggattagttgcgatctttgttttggcaaacggatgaccgatcgtgctaacccgtaaaagctctgagaattctagcgcatttatcaatttcctgagggaaatcgcctgtcacgaaaaggatcaggaaaggggttcgatggggtcaaagacacttcaaggagatggcttacctgtcgtcggccagaacctttcattgccggtctagccgagaaattgagaaagataatcaaattctcgtgcgacgagggagcgtagcttccgtactgaccttctcggcgtagttgttcaccttggctccgaattggtcgctgagcttgatagacttttccaaagcgaccgagccccagactttgcctttggccttgagtccatctttccaactgggcttctctcctgtaggtgccggggtgttgtcagtgtaaacggtagtagatttcgtatcggatcgtcggccagcgtggcgggggggtgttggcggtgggggcaagttggacatggctgctcgggtgtaagaaagccaagagcgttcgagacaggatgataagaatcaacgagttcgatattactttacgtcgactatggggacgaagtaacagcaagagattgattacagcaatatccagacgtgggtgaagcgagtcaggtcgagtgattgtgaaaagtggtctatccagaaatcgacgtcgttgtccggctcccgtcatctcggcttgggtgagttgatgatgaatcctaagccggaagtaaattcagatcgggacaatctccgacgctcctccgacggaaacaaggagagtcgtatctagcgggcaatcgatacctttcgctgcaagggcttacgagctttcaccggcggggactcccgcaaaaccttcaataagtcaacaagtcagtgcactgctcttagacagctgactggactttctgacacggagcagagcggtaccctgtgtatatgtatatcccgcagcggcgcggtacgtagcactcaccaacaggacgtcggatagtctggcaatattaccgttcaaaggggttcgctaggactcaacggctacctacacagagtccgggccacctagaaaggctctagattcccgagagaccgagtctggataaatcgtacggcaatttactttgaagtcacacggctctgcgctcgcattgagcagcccaccggattggatgaaggttttgacctttgctgtagcacgcattgttagacgcttcgaggcgggatctttgtacatttatcgagtcgcaatggacatcagtcaatgatcaatgaattctttcaagaagaagcggctatgatgtatatgccatggccagggaggacactactggaaccattgtcatctgtcaccggctcccgaccggaaccttaattttacataagcgaaacggagttagatacacgtcgcctctagaagctgggatgatccggctcatccaccttcatcttgtcaacatgtatgtccgctacgtgacatcggtactccgatctcgtcgatcgaaagataatacaaagaaactagagatcgcaattaggggcatttcagccaggtatcaccgttctagccatcttttccagatgtccgctcaagctggtccaggaccatcgacttccttctatatgcaggcccagaagcagaacggaaacaataccaataacaatgcccctatcggtaacgccgggacatcaggggcagcgaacaataatgggtctgtcctggcacccataggagggacagcagaggacgttgctccaggagagccgaacactttcacagacgcgcagttggaagagttcaaggagcaggatcggtatctacccgtgagcagacgttgatctcgcgctcgtctgatgacgagcagatgagcttgaccaaccctcaacgcccagatcgcaaatgtggggaggatcatgaagaacgctttgccatcgaatgcaaagattgccaaagaagccaaagaatgtgtacaggaatgcgtatcagagtttatcagtttcctggtcagtccgatggagcacgactgcagaccgagccagtctgtctgattagctcgaccgttgtcccgcgttacagtcatcggaagcagcagacaaagtcggcacagacaagcgcaagacgatcaacggagaagacattctgtatgccatgacagcgttagggttcgacaactatcaggaagcaggcagggtatacctagccaaatatcgaaacgtaagtccaatttgctgatctgccatcgtgaacgaggtctgcccgctgatatgacaatttgttcttgacagtacatcaatgagcatccccaccgaccttcacatcacgaacgaacagtaccgccttctgcgcagacctcgaatcggaatacccctctacagacccctatcacggatgatcttttagatccatccagtttcctaaatcaatcgccagacgaaagttttgccggcgatttcaacgcgttcgtcaacgaagacatcgatgggcccggggacggggaagacgatggggaagagctcgacgcagatgcagaaacgggaggtctgacagagggcaacgcaggtgggaaagcgaaatcgaagaaggcgtcagcatcaggcaagaagtcacccgcaggaggaggaaagaggaaaggcggagctagtggagcaggtccgcccgaaaagaaggccaagacgaaaggggcgggggcagctgctgccacagccgcagggaagaagagtagcaagaagtaaggtagcggacggtttgtatcctacagagcgtacgtatgcatgacgatctgtgtccttaccgagcaataacatccgcgcaattgagagtgctccgttggcgacgaggggaaggcgcgtcttggaggtacaaagcatttccgagctcaaacctctcgctatacaaacactttcagagagacaggaggttcctatagaactcgatcggatggaccatgcaagatgagcaaacgtcgtgatccctcaaggcatgttctgcttctcagtgacatgcggcccagctggttgtggcctttactgactttcgagactggagatagcatatacgatatcgcgactgctctcaagaggcagaccgtgggctcaggtcagcaaccggatggaagtgactgtatataccgcgaagttcacctcctcgcttcgtggagatgtactgccggatggtagggtcaaaacgtctggacaacttgagccgcagtcgggataaatgggatattcggctctgcttggccttggcacctcatttcgacaagacatctcattcgagtctatagataaaattacacgcatacagttcacactactgacacgcatctatcgcgtcacacagccttgtatgctcggtcggaacgctgagtcgactccttcccaaagtgtcggtcgccgtactcgcacgcccacctgttctcagggtcccacctgtcccggacctcgcagaacttttcaaacttggggtaaatctcggtcaactttgcccgagtgacgtcgtgctgcttggcccagtgaggtcggccatcatgatccttgagaatggcggtgaaccgctcgaagagctcctcgtacggtaccgaaaacccatagggtctgcaatagaggcgctcagcgtctcgatcgagatctcggactagccctcttgtgctaggtgactcacctgtattgcacgatcccgatccaagtcgtcctcaaaccataacttgggctgagccaaatatcatccggagcagtaaacctgatctcgatgggccagtgtacggggtttttctcttgcttcagccagtcccggatctctaccaacgtctcgcgggtttgatcatatgggatagcccattcggttgtatattgcgggaactgcatcgtaaggcatacggtcaacggcaatcttcaaaagaggccagcgaagcatcccgcaaagcccggactcaccaaacagtcaaaggtgtacaccttgtacccgtcgtcctgcgcgacgctgccgtcgctttggagccaccagacccacctcccgacccactgggtcaaccaggggaagaagcgagcggtaaagaggaagagctgggtcatatggtaccctttgaattttccccaccactccgcccatgggttcccgggaagaggatcctggacaggtgatttggttgagttgatttttcagctgggccgatctttgcggccatagacgagcgagagactcacctcgtaggtcctgttggctcgagcgatcatgacctggtccgattgagggtaataccacatcctcacgtgctctgcgctctgcgcgatctgatccaacatcccttgaccgaaatcttcaaactggacgacctcgcggtgtacatcgtcggcgagctctttcgtggtaggcgcgatgagcggggtggattctgaagaagaagacgagggggcttgtgtgtttttgccaaaagacagatccaagaggtcgaccatcggcatgggggttttgacctctttcaaacggaaggcaggctcaacccggagcttgatgtcggtgatgattcctgtgaggccgagaccacagctgtttcacgcgtcgaacgggatgagcatgggcgatggcaaaagaagacaccccgtcctctgaaacaggaacccctaagcgagagacactcacatggtggcgtggaaaagatcggcttcaacgtcctttgagcacgtgatcaatcggacttttcccttcgacccgtctttcgggtcgacatcaccccctgcgacgactacgctgatctcctcgaccaaactggtgaggacggggaaatcccatccgctaccgtgcgtacacgtggtaattaccccagcaaccgtctgatctgaaatcgacccgcagttgctcagcgcgcacttgttgtccttgagccattggtggaggttgtgcaggatcagaccgggttgaacgtgggcgatggtcttgtctccagctttggtgatagaaagcggggacgagaaggcatcggtccggacctgccaagcagaagtacatgcaagatccgagggagagtgtccgacaccagcagctcgaagaggtttcgaatgtcgtcttgcaagctcggtgatcaagagaacgtgggtcgtcgaagatggccggaagactggcgaggcaacgatcacgatcggtagggtccaaattagcgtcaaacggtgccacgcgcgacattgcaatcagactcacctcgttcaggttcgcaggaaaacgttttggcccagttctggaatcgcttttccttgctgtttcggggtaggtagacgtggtcgcggttgagagcggcctcgatgtcgtatgttgacaaagtggctagctcgtctgcggtgtactcgaccgagtccattctggtcaggatcttttcgtttgttcggctgtgaactctgagagactcggcggaaagctaaggtcgatcgtgctgctttctacgacaaatatgagccagattcgaggttgcgaaatcgagacgatcgggaagcgatggcctatccttgctttatcatgctgctcggatcgctcgaagcccgtattttcctgaatcgaacgccactttcacaatttcgcccagagcagctgtctcgcccgttcggctcggcggcggcgatgtggctcgctcttggacgagatttcccgatgcttccgtcaccagctcactccccctggaccaccgagatcggcgctgatgcataagccgagtggcacgcgtggcacggggatccaccccgtgtcggatgcagatcacaccattcgatcatcgccaaatctctccgaaagccaaaaaggaccagcttcaggtctcgttcgacttgtcgtgaaatactgcggtcacacagcattggaagtctttacatgaagaggattgtttcgattgggtgtcattggtttgcttcgttgaggcagtttcagatgatgccggtgggtcacagagaatggcgaacctgtctatttcttttgccagcggagattgactgccgcaggcccgttcgctgctcaaggaggcgtccgggaaacccatgggcgtaaaccgagtcatcaagctcgccatccctctgcgaaaccctagtgaaatgcgcagagcgactccggttcaaaatcatggtaagttgcatcgacagatccaacactagcctagcgagtaaagtcgcaatcagaacggcaagtctggaggccgaagtgaacattctgacaaaatatagagggtatcatatcatatcttaactcggtttttaaactatatctggctttacatctgattattatcgctatccgaaactagccaaatctatcaaatcataaatgagaccgtatcatcctgtcatatcgtcgtgttgtgaccgtcaatctcgtcctgttccacgttcttgtgcagccagtcgtcctagacaacgacaaactcctcgacctgctccttcttctgcttttcctcatcttcggccttttggtcctcgtcctcgctatcgctgaacgtctgaccagcttgctcttcgtgctcggtagtctgggactgagcctgaacatcctccagcgggcgggaagattcgatgtcgaccgtggcctgttcgttcggcttggtagtatcggcgtccttgacaggctcagcctcagtcggagctgtagtcgacgtttcgatggcatccgtccgaggcatgggttctcgagagggaagagcgacggtaatggcttccgaagtcttgacctcgtcattgtcctctgtggcgtcctcgatggcgggctcagtcttgtcgtccttctgctcgccggtctttgcgcctcgaatcttttcccagacccgcctcctaccgacttccatctccccgagcttgccttcgaccaacctcacaaactctctcctcgcattcctaacctgctcatctccgtcgctcgagatggcgtccgcggcgacgagcaatcccaagagcgcctgggcatgagcgtgataaggcacattggtcggggtgaatgccaggggtgggacgatcagattttccgattgactggaagccgagtcgacaggatcagccagggcatcgaccttgcgatcgtttccgtggtgatggtcggcttcggggaggaaatcgagcgtctcggggaaagtccacccttcgtccagctttatcaacttgttctccaatgcctcgagcttttcgagacgtgtgacgcggagcaggtgttgacggtacttagcctggatgaggtcggcggtcgcttgagccttttcagcctcgagatcggcagcagagacgggaacctcgtcgtcctctgtcgaggtcttgggagtcggtgcctcggtaggagcggcaggggcaggaatctcgggagccggagacgtggtcgcttcttgagtaggctcgggctgaaccgccgtagctggctgggcggactcttccggcttgttctgagcgtcggtcggcttggaaacggggtcttcaccctcgtcctcgtcgttcaatccgaaagcgtgagaaaaggcgccaaagaggtcgtcgatgaattgcagggcgacatcgacttcgccggtcttgtcgtccttggtagcagaagcaggagccggggtgggtgtcttggtctcgctgcgggtcgaggtcgtttccttctccttctctgcttgagctggagcagtggactgaggggtaggcgcctgagatgcgggagcggactgctctcgctcgccgtcggaattctgttggctgatgacgacgtcgggtccaaagatcatcttgagaatgtctatcgggaagccagacatggcttcatcttgcttggactcggatggggcgggagcacgagcgggactcggcgtctgggccttggccttgaccggggcggaaggagtaggagcacgtcgagatgattgaggcacacaagcactacgatgaggaacgagacggaggtcagtcgatcgtccagcgtcggacaagtcgaagggcccggccgctacacacctctcgacctgttcccagaaggcttgctccctagcttgcctctgcctagcgagttgcgcctctaccaatttcctctgctcctcttccctctgcttgatctgcctctgcctttcttcttgagcacgttgatgctgagcaaagtattgttgctgcgcttgaatctgcctcgcgcgacgttccctcgcctggacggcctcgatctctgcggcctgttgacgagcgttctgaatggcccggaaagcggcgatctgacgggcttcctgaacttgctgacggtaagcccgttctgcttcatgtcgctcgtgttgctgttgcttctgacgttcgagggcgatacgttgttgcatctcttggtacaacttggcttggccctcgtcccgacgcttcttttcggccagagccgccgcttgagcctgtgcttgggccttgcgggcccggaggcgttctagctgagcgacgagctgttgttcctcggcatcgaggtcgttgtcgttggcaaacgaggtggtgtagacggaaggtggcgaaactcgaccgtgcctttgtccttcaaagggactcgagcgagcctgtcctggatgcgcggcgtggtggtgatggtgatgatgagggtggcgaggttgagcggggccgacttgaggtaacgcgaagatgggagactgagctcgaggctcaaagaagaaggtagggtagccggacatggtaggtggtcgagcgatggtgcgatgcggtggtgttggttgtatgttagcgtgaggctgaaagtggcgaggttgatgatgtgtttgatgagtttgatgagaatagtctgaagaagagaaaggctgatagtatgacatggtggatcttatctctatatactcttacggcgtctacagatagctgacgctgaccaagtgtcgagggtgggttggtcagagagtaggagagtggatcccggctgacctcgctgacgaatatgatcaagcgatgatgatgatgttgctcgaaacctcgaaacgtaccttcttgaactttcggtcaaacccgagaatcatctcgcgaaatccaaaaagagaaacggaatcttcccgaagattgcttgctccccgggggaattgcttccggcgagggttcccagctttacgtcagacagctttccgcccgatcacgtgattcgaacctgcgcttggaacccgaggccagactggacaggtctaaacaaacgtacgtagtgacttgacacggcgccgacaaacaaaggcgtgggcttgtatgagcgtaaagaaatacaacgcggtgcactactcccatcacatgcacagaggtaatgactctttgaacgattcgctcaatcacttcttgcccttggccttcttcgcacccggcttctccttttcatccccctacagcgtgaaaataactttatcagcatcgcacgtcctcttcccgcaagacgacaaccgctgacctttcgcttggctccgcccttgcccttggtctcggcggctttcgagcttccagtcttgctactgctgacgaccccggtaggcttgaaaaagccatccagccgtccttgctgctttgcgccaagcatcttttccagtcgcaggcatccagcccgcaccctttcctcactatcaaggtcgaatattgtccagatgatcagtcccgtgcttcaccagacacaggtcaacgcagactcgcctgaaacccttttcacgacagaggaactggacgagaccgtcgacgtcgggtcgtttccagtcgagctgaatgtcgcgacatcagggtgacggcgttgtcagcttgcacgtcacagatgaaaccacgcccagagtcgcccacagacgcacctcgaggtcgtccccaggcgtcacgtccggtttcatgaacacctccttggcctctttccagggccagtactcgggcaattgcatcccacccttgatcccgaccttgcgcttgggcttggatcccgtaccagcggaagaagaagcggcctccgtcttgacggcgttcttgcccgtcttcttcttgctagccgcggtcgaagcctttttttccggagatttggatttctgagaacgggcttcgggttcaggagatgcttcccataccggctcgtcctcttcgtccttgtcagcttgcttcttgacgatcggcttgtcttcctcttccgattcgtcgctatcgaccgtgatcctcttcttcttggttttggtatccgtagcagatttgctcgaacccgcatgctccatctcttcctcatccccgctcatatcagccgcgactcgcttctcgtatccatcctcgctctccagatcgatgtcgacgtcggggctggggggcgccttgtcttcctcctcggactcgatctcttccggttcgatccccgccccggcttcagcttcggcgaccttttccgccatcttgcctcggacaaaggtttcgatcgcggcgagactgccgtgctccctcatcaacttgagcgccgtctttgggccaatccccttggcgggttcgaggtaatcgcatccaagcaggatacacagctcgatgaactacagggtttcgagacagggcatctcccgaaaagtcagctacagactcgctcggaacagagattcgctagtctcaccctctccatcgtcatgtcgagctcctctagcacgaccttcagattgatctccgaaatgggagcctttttcgcctctgaaaaggtcaaatgacggagcaacaacggcgagttgaaggtgagcgtgtccatgtcttccgatccagccgcgtagacctttagacaaacagcgatttggaggttagtccctctctctggacccaaggacaagctgaaaattacccacctttccggctcgagccaactcggcacattgcgcttcagcttctccaggagccttcggacgtaaagacggaatcggtcagtcttcttccagagtgaaagtcattgctgacgtcctggactcacgatcaggaacggaattcccatcagacccaacaagcgacgacattcctcattgtgctgtcgagtaggttttacctgtctccttgccaacttgtcgatatcctcggtcgttcctgtgcagcgaaagtcgcagtggtcagcgagaagtaaggatcttttttttttgaggaacagttcggaggaggtagattctcaccgacttccttggcttccgactcggcttctgctgcagcactccttgcggcgaaccgcttcgccagctgttctcggtcgactgacgatcaatcccccggtcgcaaatatgccttgacgatacgggccgtgacttacgactccacccttgagctcggggggtttcccgtcgaacacgtacatcggcttgataccgtgatccaccatacgaagcgttcggaagaagaatcccatgagatggctgtgatgatgcgaaacagtcagtgaccggagagcgatgtgaataagtatcccttgcgtggggtaccttgtgacatctccgttttcgttcatcaacatggtgccgtccttctgtctaacggcaaccagaaattggtagattgacctgagtcgggaatcgagattggcacgtcagcatgaccatcgatcagtcaggcagtttttctgtcgagcacattgatgccacttacatggacgcatcgatggccacctttcttccgaacagctgaaaaggatcaaagcgtgaggctcagccttgattttgttcgtgtcttccagggtcgagacttacggtcttgatctcgtgctccttcatcgccttgggagcattctccgagaggagagcggttagccctgttgaccgagtggaaagttagcaaacccgctcgactcgaggttcattgagagaatcccgcttgcctttgatacccatgattgatttatcagcttcgaggttcgcctgttacgacctctgaggaccgtctagaggctatccggagacgctgaaatgctgattggggaggggatggattgaattgttccgatcgaggatgagatccaagttgatcatccatcagcctcgcctgggcctaccctcctcacgcgccttaaatgacgcgtttgaccactttcggcgcgtgttgacaatgtcaaagtggctaccccaccccccatacacacccttatacaacctcggtcttgcatgccatgaagctattatagaccgatgatgcgtggaacggacataccagtattgtcatgagtggtagcgaaaaattgccttggttggcggccccacagagtctacatcatcaggcgaaatctgtagcgggaccatcaaagccgagcaggtcccgaaagggtaaggaaatgatactgcgattcgattcagggtgcggctctcatccagcacttcacctcagagtacaagctcagtagtcgaggacaaccttctgacaataggttccgagtggacagggccgattctggtacgtcggtgtgtctgtacctctcgggctacattgcttgactaggtttcgctttggactctaggcggagatgattcagatttcggccaggagagtccagagctatcgactcggaagccagcttctcgtcagaagatctctacctggagtctatcgccagaactggcccgcctcggaccgaagaagagatcggccaacaaggagaaaccagtcgtagaggcgaaggaatctctagacgagctgttcggtaatgaaagcctcgggttcaagcaagccaagctggagcatatacaacatgctatagaatccaaagtcaggagtagcggatctcgtacaaaaatcgaatccagcggggacgagtcgagcgagatggagtttaaaccgagaccgatcgtcgcgaacaagcaggtcaagccgacacagttgcgggatataaaggcgcccaaacggaaagaggaatcgatcgatcgcggtttagagctccgagaaggcgagtgcctatcgagcattatcataagtgtccagctatctctttgctgatgtcatgtcggcttgcgggatcgcagatcgacgaaggcccgacgagtccgagaatgtcttgcttcgattcctggacccggatcaagaacttgaattgagcagcggacgcaagaaagggggcatgatggccaaatccgcaaggccaaagaccatgcaagacggaaagctcgtatacagagatcagacgctaaagcttgaagaagacgacaaagcgatagcgggactacaagagcaggtagcagacgacgacgatcttacggcgtcggaaggagaattcgaggtccttgcggcaggattcactccttcgggattcgcaatctcctctggctaccaagggactgtggttgccgataacggcgacgacgatgatacggttgatgaagatgaagacgaggccattcaatttactttggcttctgctgctggatcttcgccgcctcttcgggcgccatcgaccagggctcagaatgcctcgaatccaccggggtctccagtctttccgtcgccaccatcggatccacctacgattcgctgggaagatattcgcggaaccatgggaccgagaagggggaggaatggcagaatgcttgtgcccgggcagtcggatgacgaggatggcagtgtgcaaacaacgaccttacctatggtatccagcggttcggccatgcggatgaagacgttcgtggccaattcgagaggcaaggacagggcaagaaaggaggaagatcaggcggcatacgttagtcttcgttggtgctttgttcggacagatacgaatcttggtcggtcgaaggtgacatcgacagctttctgatgcgcgccttgccttgcatctaggacgacgcgttggctctcggaatgaaacctgacttccgatgctcggcttctcgccaacgcaagcaaccttactcccttgatccagaacggcccgagatagtaattccgatcgccatctctcgctttttgcgccgctatcaacggctcggagttcagttcctctacgaccgatataaaggtctcaaagtcccgggagtttgggagtaccccttgaaaggcggtatactaggggacgacatggggctgggtaagacgattcaggtcacggcgtttgtaagtctgtctctttgccaatacaaccttgaacccgtctcactcacctttcccatcgtagctcgcggcgatcatgaaaaagacggggaccaagcaggataccgatcaattccattccaggaaagatcaagttcgcgcgaggctgtccaaaggcgcttcgatcggccctttgatatttggcccaacggctttgatcgcttgcccaacgtcgctgatcgacaatgtagggcttcggattgccgaaccagcgcgttgtgacctcctgtgctgatctgacttatatggcagtggtgtcgcgagctggaaactgttcgtcagattgggtaaggatccttttgcagtagcgcttatcaaatcgatccctttacagtggggttacttttctgtagcaagggcagatgggcaacaaaacgaaagaaaccaagcttacaggaagtatcatcaaggctttcttgatatccgtgagtgaaacgtatcgcctaccaacgccgaacgatatttacttccgccttcatatatagttatcgtttctcactcgatcattgtccgcgacatcgacatcctgagcgagatgtacttcaggtgagcaggggatgggcaacgcaatccggatgtcgtgcgatttttactatttcctccttagtgtaatgattgttgacgaggctcatgtcatcaagaccccgaaggtgcagaagactatcgcaatgaagaacatcaaagcgggcagccatttcgcgttgacaggtacgtcttctaggcgctgaaatacacttcttcagacagaaatctagtcctgacagggccgaatgacttttcaggaaccctgattcaaaatcgttacagcgagatgtggtctgtcctcgatttttgtagtccaggcagctttgggacacatcaacagtgggaggatacgatcggacgacccctcaaagctggtttggatcacgatgcctctgtcaaacaacttgcagagaagcaagtgagttcacccaagtccgatatgatagagccgttctgacacgtgcatcgtctaggtcgtcatggagctggtcaaagatcggatactgcccactgtctttatacgccgcactaaagctagcgtggcccaagaggtgagtggaaccattgcaaagacgagacctgctttgttaatcaacgtcctattcagctaccggacaaagaagatcaggtcatcttctgccctcttacccctgtgcaagaggctgtgtacgagagattgacccagagcgagcgtaagtggtccacaggctcgcacttgctcttgctgatcacattctgtgtagctgtgaggcactttttgacgagagacaagccttgcccacgacacgcaggtcaaaagtaggcatcgttggaatacatcagcatcgattttgtttgctgacctggcaaataacgtaggctcggccaatgttgccaaaggccagacgatgacgacctcaactggaagggattggtgctgaaatagtgagtgattctacgcgttcattgggggcttacgttgatggtcttctgggatgatgtagccttacttcgttccggaaggtagcaagtgtgagtcaatccgggctgccggctcgtctaacaagacgctgatccgagcatttctccagcacgttggcttgatctatccttgtgagtccgccgcatatatcgtaccgcatcgaggaggtaattaagcgaccgcgaaacctcctcgacacctacccagacaaggacgatagacccgctcaagtaagtcttgaggactaggcctaaaggtacaatacgctcacctagcgtcatcacaggtcgcggccagcagagggctattcgaagaatgcgttagtgcacttcactgaagcgaaccagtatccgagtcactgatatgtggcgggcgcgtaaagttcccggattacaccccagaggatgagggaagcaatgctttgggtgatctgaacgctcattataggagtatcaaggcgtccgaggccgctatgtgagcagaagcattggtcttttgtcggcctagactgatgccggtggctgcagggacaagaacctaagcgggaaatggcttgtgagctcccctatatacttccaggctgggccagtcgactgatacccaagagcaggttttagagcagttgctcttgagctggcggctggacagcgccgcaaaaaataaaggtattgcgacctgactcggatagttctgggcgtgtgtatctcataaccaattctcgtgcagtactcgtctttagcaactccgtacgactactgaagatgcttgaattctggttgaacgtcggtggtgagttaaagcttcgaatgtcgacagtcacgtgctaatccttgaggtaacaggttttccgtatgagatgcttcatggagggcattctacggctgagaggcagatgagcgtcgactcgtttcagaatggcgacgcgttcgtctttcttatcagtcagtgaaaagcacccgatgcgcgtccttgttactgattcgtccctttcaggcactctcgctggaggtgtaggtctcaacttgacagctgtaagtcgcactcaacaaaggctgaactgaaaaacccgaattaattggatactccccctcaggccaacaaggtcgtcattttcgacccatcgtggagcgagtagatgaatcccatacttttgggttccaacactgcaaataacgcatatcttgctcttagatcctgcaaatgacctacaagcaatggatcgagccttccgaatggggcagaaacgagatgtgtaagtttacatgcttgaaatctgcacgtctgttctctgccgacagggctgcgcttctcaatcagtaatgtttaccgcatgatctccactggtacactggaagagaacatgtacgaacgccaacgtgagtgaggccgatattgtggagtttccaatcatttgagagacggtcacaagactaatatacggatgcttcgtagtgaataagcgctcggcggctcgaacactgtaagacttggtgatggcgtatattcccgttttacctcggactgacgtacctgttgtctcccagttacgaaggcacggccgaagcccggctacacaaaggtcatgaaggatccaagggcgacttgtggggagtcgagaatctcttcaagtataccagaggcggtaccgttaccgatcgcgtcagtatggtctgtcgcaatctttcaaccgggcgctaacaagtcagtcttgcaggtcacacgactggcacacgccgaggatgaggtcctgcagaggttaggcaacgtcttgcagaaaaaggctcagctggacctcggtcaaatgagagtccgtcctaccgagatcgaatatggcgcgggcgaagaagccgaaaatgacgttcaggagactcaagagggactaatggtgagcggttatcaacgtgtcacacgggagctgttatctgaacaggatatgttttattggcagccgacgtatgatgaacaaaaggatgacgatagaatgctcgactttttgaacctgggtaagcagaataaggtgtggtcatggcggcaccgtttccgactaatcgggacgatctgatgtttaacaacagattttcccggcttgcgacggcaggtcgtacaagagtccaaggcttctgctgccgagcagcatatacaagagaatgcgagggagcaataccggttgaacaagcaagctgggggggaaaaggcttttgactatttcaaaagcgacacctatgcaaactcggctactgagcgcaagcgcaaggcgacgagtacggcagagcgtgccgtacctacgaaggcgcccaagttgggcaaaggtgccataaagacgagcttgattgaagaggaggatgacgaggattgagaggtcgcgaaattgtattgtattcgcgtatcgcttcgtttcgctctcggtggccgaaatgtcgcggcggagctattttcgtcgatcatccggttgtgagtctgataccgggtcacatgtcggacgatcgctaatggcatacgcatgacttttgcccgccaaacaaaaagaagccgagaggatgagcaagccatacccctcgcatccgtcagctcgagattgtcaagaatggtagatctgtctcctgttgctcgatcggcgacgcgggcgagcggcaggagcgattgctcgaggcaagacactcacaatgagtggaagtcttgctcagcacggccttacaaagcaagaatcgttcgggtctcctgactttgtccacggcagacctcgtcccgttttcgctgacgacaaggacttcactccccttgttcagccaacgcgaatgcgacgggcgtagaggaagatcgggctcggtctgcccgggtaggctttcagcttgttttagtgggcaaagatcggcggcccgagatcaggcggttcgagagaccattcgaagcgtgggtcgtgcgagtggatcatcatatcgaaagtgccgtttttcgatccacttgccctaccttgccacttgctgcttgatgcgctcgatcatcaacccggcccaagacccaagccgagcgcaagcacaagcacacgcagcgtctgggtcagatcatcgtctgggacgtgctacgtgatcaaaatccgactgcacgcgtcatcttccagcaatcagtggacaacgaggtcgttcgcagtcgttcgagcagtctactggaatatgccgaatatcaatcctctcgtttgtgaccgagaaccggaatactgctgcgactagctcgaccaggagcgactacgccccgtttagagatctcgcgcgaggggattagtcgtgcccggtttgttgtttgtggccctcctttcgcccgcccggtgcccgttcccgcgtctgggccggttcgtccgccgaagacgctcggcctgaggccgggacgctagtcgacagctttgtgggatgaccgtaccgatcgttgactcgcggcctcgcggccaagggagccgtcggtagttgagagtatgccgatgagcggtcgagatgattttgcagcagactatcgatattagagccgtggccactactagtaccacttgttgtcctagacgagatatcacgaagtggtcgacaatccctttgaggttcttgtttgtcgttgtcaccacttgctgtttcgtcgtacgaccttctagcctctagcctgtacccccttgggcctcggtcttcatatttcaattctctcccgcgcgccatcgaacgaggaaattccaacgaccaacacgctgctctcgacatcggtttcaaaggatcacgaaccgacctccatcagcgaccacaaggacatcgagatattatcatcattgttctctctaccgtcatctactcgaaacagcggaatgccagtcgtcacgataacctcgaatccgacgggctcgttctccgcttgataataaatttaacaacaaacgtcgacttagtcattcgtcattaccgcggcagatcaccggacgaaagcaaaacgtttctctgatctctgtcgaagaaagggagtcacgatttctcgtacgaagtcatcaatcgcggtcgtccacacgtatcggctcgacactatatcatagcatcagactagactcgcttcaattcgcctcgagtgcggaattgcaggtctataaggacggtgtgatacgttcctagaagaccgaccggacgtattcgaagtgaatcctcatcaacaagaaaggcggatctcaatagcacagctcaatctttacggggcctgtaggccatcaggtctaacccccttataaacaacgccgacagccgaaaccgactcgaccgtttaggccaaccagcagcttgggcgatagtgccttttgagaggacaccgagatggccgtctcctttttgacccgtctacagcagacgatcaacacggcattatcctctgagcctcccgtctctccaacaacatccacatccaacctccccaaacccacacaagagacgcctaccaagagctcatgctggcttctcgatccagaatcctccacaccgacaccgcctggtcatctccccgctgaacgggggagatcgttggccactcccaatggctcttcactcggcacctcgaacacatccggggatacgcttcctgctcacctcgatgccaggctatacatggatcaacaggacatgttctctcccagcgaccggaccatcacgcaggccacaggttcgacgtcgagagggtcggtggacagggatcctatcgtgctcggagagaatctgcccccgggttcagtcggactgaggggagtcgaaggtaccgactctactcccagtacggccacggtgaaacgttttgaaaggcccgaagaggacgaagtcgaggcagaaacgaagcggaggagaaggaagcggggcgtcaacgaggtgagtggggtcgagaaaagccgcttcttgcctacggaaccgagcaggacgtggtcgtcagatgtcgtcgttggctatgctgatctgaacggcgtattgttgggcatgtcagaccttggtgatcgtcaggccacctcctacgagcgggtcgaaaaagttgatgaacctgcagatccagctggtactcgatgttgatcgggacaagaagaagagcaaaagcagggtgagtgttggggtgcccccatcacacgacgaaaaagacctggctgatcgttacttgttcggcacctcttcagagcacgtcggtctcgtccacagcgactggctcggaatccatcggcctcccactcgacctgccttcgccctcgatcctgaataatcctacaggagttctgcgccgacccgaggcgccctcgcgtctcagcacccctgtgccgagtcctccttccaccccaggtgctggatcgatcccgggtgacagtccgacagggaggaggacccgcatcaccatcgccgaaccgaggagccagagtcgaccgggttcggtcgtcaggaatccgagtggggatgacaaggaagtcctgaagacccacgcagggctcggtagcacgtcggatcctgaaggggtcaatcattcgaccccgtcgtcatccgacagcgagagacagaaacgtagggatcgcaggctgtcccgggcgtcctctatggtctctcaaacatcagtcacgagcaacgtatcagccatcagcggcatctcgggcgtgagcgggttgagcgagtcgatcggtggtagcgggacgaggacgagcaagcgtggcaagaggatcgtgccgatgtacaacctgagcgtgcacaacgtcatgacgacgagcgtgacggatgctgggacggacgaaaaggtcgccaaggtgagtcggcccgagcacgacggatgaaggaggatgaactacaagctgaacaagcgaccgaccacagttcttgaaacgggccgtcgatattcactcggtcggatcacttgaacccgccgagatatggcatccgtatgctctcgatagtcgtttgccacacctgacacctcatcagacacgaagtgatacgggatcgcccgagaacgaagacaaggtatgggggttcaattcgacgtcggccgggaacagcacggcggggccgtcgacagctaccaacaagcggaacagtatcgattcgcctaccggcctcatgtctaggatggagcaggaagatcgagcggtgcccgccacttcgggcaagacgaaacaatttttcggcaagctcttcaagaaaaaggagactgccaatgaatccgggccgagagagtctgcgaacggctcggggatgatcagtccagccaggtcgtcatttgtcgcctcgtccgccgagcgactgttgtcaccgttatccccagcatcaactcgagtcttccacggcgggtctgaagcgagaaactcgatcgtatcggcgcactccgttgtgcccaaccaacactatgccagccacacgttcgggttgtatcccatggtctcgaccgcaccggacgcgagtctgggcgaaggcagccttcatcgaccgatgggatacacgtttaccgtgaaaaagtgggctggaggcaagggtggactggagaccatgatcgccccgccttcgtgggcggcgaggtttgcaagtaccgacaagcccatggtcggagcgggtcccgaggggagcgaggtcgtctttgagtggtctcgaggcaaggggaaaccgggaagactgagccgggccgacgggtccagatcagctcacgggaccatcccgatgccgatccgatcgagttctctggcgagtactcttttcggcgatacgctcgaggtcccgtccgccgagagttcgcggccgaacagcatgatttcattgtcggacgatgcacatcctgtgctgtcggtggggcagatgcaacagcaacaacaggccgctcgcaagtcgatcgtcgaacgggctcgatcagacgaccggatgacgacctcgagatcttcttcccccgcaccgagcagtcgagcgcccacccgtctatccaatcatgatgacgagtctgacccggaagactcggagactccctgggtgtgtcgggtctatgtgcctggtcgtcgggatgaggacggtgggcgaacggacgagaagaaggggacgaggaagagcagacgacgtgaggggggtcacgatggcgagggcatcgtggtcgctacgctctatccggcgcctcatcatcctagggtgatcgcgcaggtcaaggtgtctacggattatatgcccgtggcgacgggtgtctttagggccacgccagcgcctgcatctcagcagcagcacactagcaataacaacaacaaccacatccatacgaacggtcatggcgcgacgacggcgatcaagggggacgagatcttgctgagcgaggaaaacgtcaaggacgtcgtcggggtgacggccatgtggctcgtcgtccgggaagatttcggcgggctcgtcaagaagaaaaaggccgtcgagacgagacgatgatgtgtcgccagggacgaggaggcggcgacgagcggttttcgctgagagagattgagagagatgagagactttgcgcttcgttttgtattaccccatcatcctaataatcatgtatccatatcgagtgtcaatggcgcaacacaagctttggagatctttccaccccccatacttttgtcgaacgcgcttcagtgcgactttgcaaggtgatcggattacgatgtcgtccacgagtgcttccacgtcatccaccttggagcttgggcggtagagtcgatggctgttgcatgtggcatggttgtgttgctcgttgtttgttggtggtggtgtttcgcctgttgtcgatgattctagaagcttccggtgatgacgaggcggttgactagatggcgacgtgtatggacgattcttacttacgtaatcacgcgccgctcgctgtctctgtcgacgtggcacagagcctcggtccctttgtgcagcagagtggtagcggtagtgagtggtgaggtgtcaccaaagagttcaaaaaagatatcattccacatcatccatccaccccatcgactgtcgttgccacattcgccaccctcgacatcctcgacaatctcatacaagagagatatcaggacagacggaacttcgacacacacacaccaacaccaaaaacgaaaaagagacgaaaggacaagtccacctggtacaaacggggtcgacatacaaaatcatgaagtcatcatcatcatcgtccgtcctgaggcgggccatgacttcgctcgccctcgtggcgttcgtcgtcctcgccgtctttacctttatgcccatcgttgccaacgccgaagtcgacaaggataacgatttcgggaccgtcatcggtatcgatctgggtaccacttactcttgtgtcgcgtacgtgtcgcgctgaaccgcatcgttccccttcctcccttcccctttttgtaccttggtcgttcggtttgctgacttttcgcaaggtcttgatcatccttcattgcccctctatcgtccttactactgacacgactaccgcaaccccctccggctcgacagcgttcaacgtggaggtaaagtcgagatcatcgccaacgaccagggaaaccgaatcaccccttcatgggtcggtttcacgcacgacgaacgattgatcggagatgccgccaagaaccagggtccttccaacccggaaaacaccgtctttgacgccaagcgattgatcggcaggaactttatcgattcggacgttcaaaaggatatcaagcactggtcagtgtcaaacggggggcgccccgcgagtcttgcgatgggaggaagagttttactgatacgtgatactcaggcctttcaagattgtcagccgtgagggcaagcctatcatcaaggtcaagcacagggacgagttcaaggaattcgtacgtgtccgccccgactcccgctcgaaaacgattcggcaagctgatctttgtccaccggacctcttggcgtgcatccgtatagacccccgaggagatctcggccatggtcttgaccaagatgaaggagactgccgaggcttaccttggaaccaaggtcacccacgccgtcgtcaccgttcccgcatgtaagtccggcctccgtcctgctcggcctcgatccgtcggcctcgatcgtttgtcgctaatgacgcatttcgacacgccgatgtacagactttaacgacgctcagaggcaggctaccaaggacgctggtacgatcgccggtttgaccgtcttgaggatcgtcaacgagcccaccgccgccgctatcggtaagtgttgcacaaccatctcacatagtcgacgcgacgcgacacgcccgactgacctcgtctcgtcttcctatcccggcagcctacggtctcgaccgaactggcaaggccgaatctcagatcatcgtctacgatctcggtggtggtactttcgatgtctccctcctctcgatcgaagagggcgtcttcgaggtcctcgcgaccgccggtgacacccacttgggaggagaagatttcgacaaccgtgtcatcgaccactttgtcaaggaatacaagcgcaagtcgggcggtaccgacgtttccagcaacaagcgagccatgggtaaactcaagcgagaggtcgaaaaggccaagaggacgctttccaaccagcagagcgtcaaggtcgagatcgaggctttcgagaatggaaacgactttagcgaggtgcgtcccccggcggggtttcgtcacggcgtcggcggagagcgagtgctgatcgttggtcgtcaaacagacccttacccgagccaagtttgaggaattgaacatggacctctttagaaagaccatgaagcccgtcgagcaggtattgaaggacgccggtgtcaagaaggaccagattgacgacgtgagcctggcatcgtcttgctcgctcgcaacgaatcgcatgactgacaaacccacgtatgtgtcttttgcgcgcgcagatcgtcttggtcggaggttccacccgtattcccaaggttcagcaactcctcaaggactttttcaacggcaaggagccttccaagggtatcaaccccgacgaggccgtcgcgtacggtgccgccgttcagggtggtatcttgagcggagaagaggccagctcggacattctgttgatcgacgtctgccccttgaccatgggtatcgagaccaccggaggtgtcatgaccaagttgatgtgagtcggtggttggagtggcggccggcctcccgaggtccagatgaactgactttgaccgaaccgcatcgcacagcccccgaaacaccgtcgttcctaccaaaaagtcccaaatcttctcgactgcggtcgacaaccagcctaccgtctccattcaggtgttcgagggtgaacgatccatgaccaaggacaacaaccagctcggcaagtttgacttgaccaacattcctcccgcccccaggggtcaacctcagatcgaggtcacctttgagattgacggtgagtgcgcgatgcggcggcacggtgcgattttcgacgctcaaactcacgcgacgtgtctttgtcgtttcgtcacgtgctagccaacggtatcttgaccgtttcggccattgacaagggtaccggaaagagcgagtcgatcgtcattaccaagtgagtccggggtctgttcaaaccgtgtgccctgatgccgacgagctgaccatgaccccacggccgttcacagcgaaaagggccgattgagtaccgacgacattgagcgcatggtccgtgaagccgaagagtttgccgacgaggacgccgcgatccgaaagaaggtcgaggccctcaacagcttgcagaacaccatcttttcgatggagagcaccatcaaggaccccgagggtgccggtggcaagttgtccgccgaggacaagcagagcatcatggacgccattgccgaaaagaaggagtggatggacaacaacggtcaagaggcctcggccgaggactttgaggaccagctcgccgaattccaagccatcgcccagcccatcatcgctggtctttacggttccgctggcggtgccggtggtcaagagtcgtacggcagccacgacgagctgtagagaggcgctcgcagggatttgtttcacgtagaatatcagacaaacatgcacgaatgaaatgagatgggcgacggcgctttgtgacggcgattgcgattggcgatcggcgattgttcatgtgatgagctacgggctacgggtacattcgacacgatgcgggggattgtctgccgatcagacctcggtctggcacggccccatcaacggcctggccgataatttgtcgagaccgaccaaactgtagcgaatcactcaggcatcgtatgcgttccaccctatgatgctcatgaccttttccttttgtgcatgataggccacgccaggatcctgtccgattgtggtatgatcagtttggcatttttcacacagagttgagcctttcttacctctggtaggtaccactcgcagctgtgaagaaactctgattcggaccgtagcgtccttcggtccgtggcgtatgatacgagatcgtgccattgcttctcggaaggtagctccggtcgggacgcgatgttccggatgatcatcgagaggatctcgggtggcaggtctaggatatgcgagcgtccttcgaaacgatcgtccttgtacccattcagcaggatccttgttgccgggatgagtaacgtcgcggaggagaacaaggacgcgtgcgcagacacgttcatccgggttcgctctctgatcgttggatggaaatcgaggtcaggatatgggtcattccgataggcccgaagccttgtcagggtttcttggataagatctcgatcgctcggaaggcccctcggcacgggtagttccatcctggcgtagcgaatgcacgcgtcctctacgctcgcttgcatatcgtccgcttcgtccgtcgtacaatcagaccgaggggaaggcagaaacgcctgaaagagattgcgattgtagcgatagatcgccaccagcagcgtagcagcggccttgaacgagagccatgccgtgccgtcgtagtctccgagatgtatattgtgaaggaagcgagatctttgacggtctgccagaaagtctgccagtgtgaaaatgaccatttcgttcgagagtacgtagctccaatgtagttcgtgtaaattctctgccgaggtctgaaccgcgtctttgggagagaggcctttgaggaattccgagagggccatctcgacgagggggttgttgtacagtgataattcctccacttgcgaattggcgatcgctcggccaaagctggtcatgtggtcgaggccctgcagactcgataagtcgacgtgcaggatggccagtcccgcttcgtatgacccacctgaattccattgttctgcagatggaggtgtgtcagcgcggcgttcccctggatgtaatctgcgatggcagggaatacgggatcgccgatccaatttccggccaccgagattcggcgtatctccagcttgaacgaagtcgggtcgatagtttgacgatgtctgatcgctccaagaccttggaataggtgtatgcatccatccgaattcaatcggttgtgactgacgtcgaggtggtcaatgtagcctcccgcgagttcgagtcggtcgattacctgttgagctgtgtaattcgggcgggccaagtcggtcgtaacaaggtgtacagagcaggtgccaacgtagggacttaccgccgggtacaccaacgagtccacgttctcgccagtcgccaacgtcagtcatggttggtaacaacgacgagggtgagaaagcttcagccggttcgcggtggggtcagagtcatgtcctccggagtagtacctgggaaggtacgtgaatcgacaagtcgcccagggtgtttcttgatgttgccaacgaggagtgatcgctaggtcgccaggtgatggaactgggtaggagggtgaactttggccgaggtcaggactcgacaatgtcattcgcttccgtggatatggttccggtcattgagcgttcggcaactgggaggtcgggtcggtcatgggtcagggtccagggtccaagtcgatccgatcacatccgtccgtcgccaactcgagcatatccgggcgggtatctccccgagagcttgacttggggggagaagatgttcatctgatgatactggagtgaggtttcgtagaaaggacttgggcaagcaggtctcaagtcggcggcgtcggctcgttcatcccttgcgtcacgtccccgccgctctcttcttggccggcgcggcgtaatggtgatcgatttcgggggcagggcgatcgcgatccctgtcgagccccttcaggatggctcgaagttttgtcgatgtgattaggaaagaggatggtgaaaggtttcaatgagggacggggtgaagatcgactgttccccatcaaagaccggctggctgaaacgcggctcgttcggttgatgttgtgatgcgcgcgtcccgatggcgatgagcttttcaaattgttcacttcgattgcagcagatttaacaagatatatgttgttgagagagatgcaaaacctttgtggaaacacgttggtggcctgagctcgatgcgtctcgtacaaacctcgtcatgaccagacccggagtgcgatgcctcagcatgcgtcagattgagtatcaatcgaggcgacacccggcattggctcctcaatcgacatgtaatacccgccaggtggttggatgacttgttgttgtgggcggtgatgatggtagagaggtttgatgaaaaggtcaagcgcttggacggaaacacgttgccaaatcgttcggtttggctctttctgcgctagtattatatatgtccattggatttcctttccatcccccagaggtttgatgaaaaggtcaagcgcttggacggaaacacgtcgccaaatcgttcggtttggctctttctgcgccagtattatatatgtgcgttggatttcttttccatcccccagaggtttgatgaaaaggtcaagcgcttggacggaaacacgtcgccaaatcgttcggtttggctctttttgcgccagtattatatatgtgcgttggatttcctttccatcccccagaggtttgatgaaaaggtcaagcgcttggacggaaacacgtcgccaaatcgttcggtttggctctttctgcgccagtattatatatgtgcgttggacttcttttccccccccccccaccggactggcctcccttggacgactacgcacctatacgctcgtgatgacaaccccgcaatgtatgttctacagttggtagagatcaacgagctcctcgtgcaggtcgctctcggaactttacacctggggcaagtccggcctttgcgagtctactcatagtcccgcacaccccgggtctcgctgatagtacgcctttccatcccgggcggggggaatatctcgacggaatcggaacaggttcgtgcctcatgatgagaaagactatgggatcaagaagctcggatcgaacgccaacgtggaagcgttcaggaagatgacggaaaacttgtgagctcctctctcgactcggccgtctagtccatcgagtgttctaacgaggacgattcaatgggaacgtcaagggcgaaaatggcgatggaggccgctttcgcagacgatggggacagttgataaagagggtcaaaaaagatagtaaaacatgccaccaattgtcacaaacgccctgtgcggtattgcagattgtcctgtatgagtacgcaaaaaatgccgggttgcgcataatctaagctatcgaatcgttcctggtcaattctaccggttgaacccctttcaattcttctctagactgtgccgtcttcaacctgagtccggacggtctcaccgagaccttgcctttacgagtaatccccgcacccgttccgacaccttcccccgtggtggcgccgaggacggccgcctcgttcaggtccgactttcccagattctcaacttcaatgggagtgtccgaaagctgataccgccgaccttctacgacggccgctacgacgggcgcttcgtcgggactctgcggtcgagaagctccggggtccgcaagggcatatcgttgattagccttcgtcgtgttgacggacgaatcttccaattcgacgctgtcttgacgagaaggtcgtcccagtccgatcgcgttcgaagtcgccgttcgtgatcgcgcagcgctctgttcgacacctcgccgggacagaccgttacgagcggcaccgatggacgatactgggacgccgtggtcggccgatgtcctccgcaacgagatcttgcgtgggacatagtactcgatatccaggttgtgcgcggcaacgcttcctggcgatccaaatgacgacggtgattctcgaccgctgacagcagacttgatcgatgccgatctcgctgcggggctggcaggacgggccgaggagctcaacatcagcggcttgatacccgtcctttccccttcagccaagattcgagtcggaggaacattgctagcggcggacgctaggcgatcctgcagggacggtttgaactcatcctgagcgactttgggtcgataccggccagcaggatagacgatactgccacgcggtgagatgaaaaaggacggaggtaggctcgtgtcccgcctgtgcaggttcgtgccattgttcgctgcagatcgagttggcgtagtgatccgtgggggtagagccgtcagcgtgtcctcctgcggtggcgtcccaggcaaggttgctcctgtagcggtcttgacgctgacgctggcttgtcgagcgaccgaggccatactaccccacaaactcgatgctttccccgtccatgcggaatggttcgaatcggtcgtgtcatcctcccgaagtgcagctcgcgtggaagccggtataggactactccaacgtgcctttgctgctgccgacaaattggtcgacgccttggccatattggctgcagcatcgctgtccatgacgttcgaagcgtactgacggaacaactgctcgcccgaattcaacgagtgtcgtacattttctgctttcggcagcttcggtgcttgaacctgattgagattccatcgcgtgacaagactattgctcgcattggtcacgatacttgaaaattgtgcagccagagcgttttcttgcatgttctgtccatcgaccgggccaaggtcgatgtcatccagattctggccttccattgtggcgagtattcgttgctgtctgatctcccaagtgacacgaaggacctcgtccacgccgacttgctcgatcggataatgtctgatcagctcggtctcccttgatgacatcaatttccgctcgtgctccgggcgatgagcatcgcgcatgtcaaagacgatctcttctgcgacttctttaccccacatgtctttgcggttggtaggatcgttttccgaggaccacctgctggggtcgatcaggtcgctccgtacgaggatgagcatagcagtacacatgtcgacgaccgtgtccatccttgggttgctctcagccgaagctggcacttccgagaagataaagtccaagacaggtaacaggtaaatgatcggaaaggtgccggtgaaacacgttgttagccatctctggtagatgtccgttgagaccggactcaaatgacgttcagcctgtcgtgcgcagggttcaaagcattggtcaaagtgtccaccacgcgaacattgccacggcagagcttaccagcactcggtataagccttcatcggcccaaagtaaacgtcgagccagcttcgccgaccatacctgggcttggttgcgcgagcttccagcagccgtctctctcgaccctgtcacgacatcgccgacctcgcccatgaaagcgatcaaagcccaaaaggtctcggcctcggcatgcctcgcccagccattcatgacgatttcttggccattctcgctcgtgccctccgttgagtattttcgggatcgaggcttgtgagcgctgagcttctcgtcccgggctagactagaatcgtccagcgcctcaatttcacccccactcgcgaacacggtgtatagcgctcgaacgacctcgaccaccgacgaatcgtacgtccattccttgtggcttgtgaaaaacacaaagagcagcctgatcagacattccccgtgcgtatccggtttcgacaactctatctctgccgtcaaatcttgcagaatagccggtgtcggtgggcgaaactcttgcgattttaggagggtgatcgatgaagacatgtcttttgcggaaccgtcgtcatcgtggtcctgaacagtagtgagcgagatggcaggggaaataggtcgggatgcgtctgtatcctggacgcgatcgagagctgtgcagtaatatggggcatcttggtcttcgggcataggcgacaagacaatggaagggttcggtatcgatgcaggctcgaggtgcgacgagttcgcaacgagacctatagcgttggaggcgctgccattctggacagagaccgagtccaggctgttctgtttcgaccgagtcgccttgattcggtattcttccgccgcaatctgttccagccgggagactagcactcttctcgtcttgatcggctcttcctggtcagtcgccttggtgtgcctggacggtcccgcctttcctctcgcttggccttcggtcaacccggtctcgatgtcatctgaatcgtcattctcgctcgagctagagatcacgacatcccgggacgttgatcgaccctttccagtacgcttgaaagccgccaaggggttcgacttgcccaacgcttctgatttgcggttcaagaatcgatatttcttgctagacgctctgacgtcacggccgattgcagcgagaaggttatccgaggtattctcagagccgttcaagcctttcactgggccatagaaggcgggatcggccgtgatggtccgcacgaggtcctgatgtaggccagaattcacaatcagctcgtcacctgactgtagtatcaagctcgccagcatgtctcacatagtacttcctccgacgatctctggtttctgttttccaagcccgcttattaggggatgcagatcccaggaggagcgagtacgacaaaggccgcaagtgaggaggattcggtggaatacctggacaggttggaacaattcagcgagacgattcttgttcgaccttattcattgaccaacctcttgcacacaacctcctcaagctattcaactccaccgtgctctctgtggcgtacttggaggagtcaagaagaagctcgaacgcatgtagcctaggtattgcgcccagaggtacaaagggttagatagatggcttgcaggctgcatggttgcttgctagggcccacctgtttatttgatcgtccatgattacaagcgtgtctccataccgttttgccggcgcagctattcagattaggtgttgaattatagtaaagcttgactagtgttagcagtccaggaagctctcaagccggaccgctatcaagcaacttcaagctattctcaagtgcaaggctcggtgaggtcgctcagtaggttgctcgtcgcgcgtcagtcaatccgcgtcatcaaccaccgcccgtcattccaaattcaattcaaacccatctaatctcgggagttgtgaagaccgcagtgtagctggttgatgatgggcataatgaaactatcgctacatctcgtagggtgtgctcgcttctaggcggcagagatacaacctattcggagcataatccggtctgtacaggctggctgcctggcagctttgtggaatgaaatcgtgaataccgttcgtttgtcaggaaacttagaacgcgttcaggttatggcgcggggaaggaatcaggcggcaggaggagtcagtccagcttgagactagtggtccgaaacacatgtcagtctccatggcgtatcaggtcactcaaaaagaggtcgcactcacccatgcttccacctttacgacccatttgccgcttcccttcttctccctatcagcaacgagaccaaaggtatgtctgatcaccttctgcgtcgtagccgacttgaactgagtgaaaaggtcttgtagcatcgcctccttgttcttctcgcatccttgaatggcacgcagaaagtccccgagcgtatcggcggggaagggagatttggggataggcgccttcaaggcgtttggtgcgggagatcctggtttaacgacttcgccgaccagcgtggtttgaatagtaggcacagagaccttggccggagcaacgattggctcgtaaggggtcgaggtgaacgtaaaagggtcgatactgtgcataggcgtatctgaatgtgcgagacgccgtcagtcccgatgtcggaattgcaagccagcaatcgacactcaccgttcaacatgcaaatcttgtacttttccatcatcggatccacctcgcccagcctcgtctccatgcaaggacctttctgaaacggtacgagcctggcgaaacgctggttcctgctgacagcgcctgccttgccgacttcggtgtaataatcctcgatcggccgctgatcctttttccctgcagcctgtttatcgtctgtgtacccctcggcgccttcctcgaattcaatctcatcatcgccgaccatccaatcgtccatctcgtcatcatcgtccgtctcgggctcttcatcctcgtcgagcgtgctgctgagctcgacctcggcggggtcttcggcttcccattcgataccctcgtcaatcgaatagtcgagcgcgttatcctgggcgaaaggcgttcgcggtcctaccgtcagggatggcttgctccaggttcctaaatgtcacaaataatcttctcagtcggtgcttcctgcttgaatacaggcaaagagtaagaaagcttaccctcgtacgccggtctcgaatcctcccagaatttgagcgttttcctccagtacagccgcttgtcctcaaacgccttgtatacccgtctcgcttcttctccgtctcccgtctcattcgctttcgtgatcagttggtccacagtgtaataggggtatctcgttttcagatgcaggccaggtacgatgggtgaaggggccagaggtaattccggagccttggtctggcgtggtggatctcgggagcggcttcgggacacagatgctgggcggatcgaagccattcgtttctctgcattttgagtccgaccgaaagtcaagcttgagagctgggcacgcatctctttcagtagatctgtatgagcgacttgatcagctcagtacagattgtgtcaacgccacacgttcagactgaccttctttcgtcaactctccgttgggtttgaccgggccggacgccgtctcgctttctcttcttcctgcccgccctctgggctcttccactaccgtcttgtgcagtctgaaccgatcaattggagcgagcgagacgttcgtgccttgatggtaaggcttgaagtcggcataaaagtcggatagttgcacgcttgatccgcctgagcacatccaaacgagcccgtcagtcccaattccagcagatccctgaccaagctagattgtatgctcacgactgcttcgacttgcgctcctgtccctcttggtctccccccgaatcggactgctcgccggagctctgctcaggaaactgctcattatcctcgccgacttttgtttctgttgctccgccttggcctccgcctctgccttcttcttggccttttcctctttgccttctcgcttgattcgctgttcctccgtctgttaaagcaggagagcagatcgtcccaatacaagcgttagtttctgatctatactgtaccgagccctgaagtcgagccttacctcttccttcggtttccgcgtcgatttcttcttctcggccacttcgcccgcctcggcatcaacgtccatagcttccacctcctgatcgacctttacaccctttttcttcttctccttgatatccacttcgacgacatccaccatatctcgcttcccgctcccagagcctgaagctaccgcgttcccactattaccaagcccaagaatctccttcaactcggcctcttccatccctcgaagaagttccagcacggcgctcttgatccctttccgctcggtcttcctctgctcaaagacatccttcaggcccatcctgccctttccagctggaccttccttctcggggatcaactccaggtctttcgcttcccatcgattcaggcgcaatgtcatcgggatttcgggcaacggcggagcgagctcgatctgaggcaagatccgagcgagatcttcgggctgtaaaccataagagacctgttcgaacgtgtcctccaccgtcttgatcaagcctgatagattgatctctgcagtccgttggaacgcgagttgagctcctgtcccttacctcttgacaacgtaacacggggtccgtctcagactcaccgacgacaccttcttcttcacccatgacggccggcttgatttttcccttgatgtacctcgccaactctttcgaccccgatagtcccgattcctggccgagcataacgatcaatggtcgatacgcttccgggaaaacctcgagcttgttcttctttttcgacgttgctgctgatgacgtcgctccggtagctactggcgttgttgatgagggtgatgttgaagaaggcttggatgtcgaggaggatgcgatgggcgggatcggcatgtcgccttccatgggaagggtataaaggtaatcgtggaattgcacaaggactactcaccccggagccgaaaagatcagtcgacatattcccggtaacaagcggaaagtaataggcgatgagcactcacgggtcatatacggtgtgtagctgctgaccatccccgcgagatcgttttgatctagtgtcaacattttcttcttcttgttcaggacaacgactaccgagcgatgaaaagtcgacaagcaacccaatctcgatcagctatttcccgacccgagatggaatcgctctgcctgtttgttactcacttccggatttgacaatatccgggttgactttgcccttgcccttcttgacgtctgatttcgacttgcccttcttttcctctccttccccagctgcggatttcttggatttcgtcgtcgtcgtccggctcgacgatgatgggcccggtttaggtcgtttggccaagttggatgggaatgaaggtgacgatggggaggaagggaggtctgtgaggtccaggactagaggcaggcgattcgtcgagagtgttaagctgagaccatcaaatatgacagccggagcagagcgggatttaccgtcttcttgcgtcttccccgtctccactgtagtcctgctcttcgagtcgacgaccacctcccgggtgtcgctcgactgaaagtcccgtgctgaattatcgccaatcctcggatcctcctcggcctttctcttcaaggtattcccattccacgatggcgatcccggtggactgctcgtccattccatagagacgtcttgctgatccccgtttgacccttccatgatagcgatcggcataggcgagaggtgtgactgaagtgatagttcaacggtcacgcgttgtcctgctatgtcggggatgatcctctcgatgaacaggtaggtacgatggctgtcaacctcgagcaacgacgactatcgggcaggacgatacctggacaatggccaatctctgatctctgatctctctgtgtctctctgaaagcaaacgcgttcaaacgcgccaagtcgcgtcatctaacggatttacgtaagcgtgtagcaggtaggcagtatagtagagtgtgggcaagctacaagcgcatccgggatcttcatcatcgcgcttttaggcatctagcagggaataacggcagtgttctcgtcatcgtgtcgtcaatattacgtcttcatccgacttcggaagtaaagtcttgcatccggttgcatgaacgtaagaacgtgtgtgtgcgtgcaatctgtatcgatgccgttgcccgaagcgaaagagtctcggaaagggatcaccacatccgactggcaactttatgaccttgtgacttgtgccgcatctagatagctagacatcattgcttccagagagacgctctattcgaagcctatacgcacctcgagattcgcagctagcccattgtcagaagatcacgcttccaatatgtcgcatgaacaggttcgccctcgtcgctcatacccccgtcactactcatattcatcaacgcctaatgccggccctcttctttcccgatagacatcgtccaaccaaaccgacccatcccgacctgaggaatccggtcgattcaggcgaacgctcgacaagatcgaagacatcttctatcacccattctctgcgtcggcgttgtcctctttgcccccaacctcgaacgagggaggtgcggcggggacctcgggcaaatcgaagcgagcggataggatcccggatgtctcgtcagtcggcctgaaccatagcgatgcagacgggttagagaacttactgaaatggagatcggtggtcatgaccatgtcgacagtgcttcagggaagaacaggcccttgatccgggattaccagacgatccctaacgcagataacattcaagtccgaattcctagtcagtcacaaccctttcccttctagtctctccgtcacctctaaccttccgctcatgcaacgcctcccaaacaatcccgaaacatagaaaaattagccaccccgatcaaggtggaacaaaaagtctggctcgccaacgaacgtaccttcatctcctacctttctatcacgatcctcatgtccaccctcagtctcggactgtggaacgcgagtgcaaagggaagcatcggcaggatctttggagggatttacgctggcatgtgagtctgaatacgagttcgggttcgaagctgcgagatcggacgtccttttgttacggaaagcggaaggaccatcagggctgacgaccatgggctacattctctcggatccgcttggtcaatgtcgatcagctcgatcttggtactcgtctatgcttacgccatgttccaaaaacgcctgaccatgatcggaacccgagatgccggtcaattcggtgagccttcccaatctgaacgcccgtcgtttcacgttgtcaagaaaacctggagctcatgaccatttcacggaactgggatctcttagatcaactcgtcggacctttggtcatctgcttggccctcttcatcgccttgttggtcaactttgtcctgcggtatcaagacttgtgagttgaccagcgtgcatcagcaccagtacataggatcgagctaatatcctttgacatcgatcgacaggaaacatacggtcgagggcaacctttggtagtcttctcatcgagcaaattcagttactcgctctatgtggattgtaacagtattttgaagaacggatcatatcattatcaatgcattatcgtcatcgaaacgggtacatttcgtacggatcgggaggacgcttatcggtccatctcagtgaaaggtgcaggaaccaaaagggaggacgagttgaagtggatgtcatacagaaggatatcaagctacacattattatagttgttcacggcacttaagaaagcggacaagcgtttcgggaatgggggtgccaaccggtcgagtggtaacccggtcatttgctgatctacagtcttcatcagtggccaatccaagatctcgttcgacatgtttccgccggcatccaccctgcgatgatcgtactttacctcatcatcattggaacctcttgatcaacttggacatcttttccagatgcctgtcatcaagcccttcgagcgccgaggttattcgttcgagattttgagctcggaggtcctaagaagaaacaggttcgcagatatcaatcagtcgatcgcaagggtgatccgtgcgtcaagcgaagactcacttgggacgtggcggagggggaatcgaattcccgagcgatggctcgttccctgtcgatcggctccgtcttgctggccgctgacctcgcatctgcggcggccagggacgaggtaggtggggttgaaaccgcggggtacgagatgttctgggatgctccggtcctacacgcccagttgtggcggtatgtagtgtccggagaatgggcttgggatcgagagtagtagaaagcggtcgtcccagcgcccaacgccaactgtacatcgaatcaagatgactctgtttagtcatttgcgctccagcaagaagtccgagtcgacgacgcggcttacccagaataatctcgagggtcctcggaatcttcggaaatgctgacctccatgccaatgtccgtagccagtcgagtatacgatcggtccatggggtccgtgcatttgagcgcgagggtggaacaaggtatggtggtgcatatgttgtgtgaactccggcttcggagcctgagggcccatttgaccagaagaaaaagaggggtctgtcatggtaatttagttgtcggttgtattgcgagtcgaggattgtggtattgtgttgaactacagtacaggtgcttctaaatacatgctgagttcgcgcggacaccctccattatatacgagtctatccacgatcgtgaaatcaatacacaataccattcaacctggcgactcgtgtaacaatcggcagatagtctggaccagtgtttgtcatgtaccagatgacgacgctttgcgagtatattcagaaagacggccgcttgcaggctcgaccgctcatgaaacgctgacgcgatcgagccggcaccggttccggaagtaaatgatgccgagaattgccgaggaccccggaagctattcggtcgacctgaacatgtacgtacagtagtagttactacgtactcaagaggtgagaatgcgcaagcgtctatcaaactggccagtaaaccgagagcagataagtacagctacggaagtacatcggcattctaggcgatagataggacgctagctggcgaagatcgcggcttgcgatgaagagtacggaccaactcgcccagcttctcctgcccgccaaatatgccaaagagcagctgcggcaagctttggaaagagcagaccacgacgtgacccgagccgccgagattttactccttggtatcggttcgagcaaacgcaaagatttgggtggatggcttaagccacagtcggaaggcaacaagaagaagaggaaacggtcgtctgggtcttctgctaggtcaggtgctctaaagtccagtgatgataccaccacacatggggaggaagatctgatagtgctcagctcggatgacgaggaagattgtatcgtccttggagaagagaaaagaccaaataaagttccaacatctcctcagaagagcgttcctcaatctggaaaagtgctttcgctagcgactctgcaacaggctccttcgcccgtgaaacgaaatatagcaagaccacccgttgtcttgacgacggcctcagctatatcttccactctcccttgctccttcgtcccttctcccctctccgccgagttcgctaccgcgctctacctctccctggtgaaagagtcgcagacggaagaaatcatttccgaagacgctgaaggaaacaaggccatcgcgcaagcggggttcagacgtcacaaatggtttctcaacgggagggaagttgtctctccacatacgagcggctattacagattgagcgaaagtgagggcggtgtcaggaaaggcggggaatactgtgagggcgatgcctttcgtagcgtgtggtcatcatcaagctgaacgtcgtcgagcgctgtacagggtatgctggcaagaaagaacccgaagctcccgtgagcatagtgcaaacaaagaccttatacgcttacggttcactgaaggctctctcgactaatagggatttccgaaactcctgcgaaaggcaatggagatcatcaatcctttcgtgaacgatattcttgaacctccggaatcaaacgcctccagcctacgggatgatcaaggttggagaaaggacgctcggggtggcttggcggggcccaagagataccaattggaatacgatggcccttggagggctaacgttgcagccgtcaactgttactcaggaggagagagcgcgtgagatggaaccgattccacttgtcttagagggcagcaaccgctaatccggcttgacattgtcccagtgtcggttggcacgccgatcagttgactcgtaagcgtacgctgagagcaagaccagtgatctcgatctgacggattcctttgcagatctggggccgtaccccactatcgtctcattgtcactgggcacgccgaggtctttccgcttgcgtcctgcgccagatccgactgacccgttattggacatcctcgggcggccgatgcggacatacgaggtcgtgttgcctcacaattcgattcttgtcatggtatgattgccaatgtagcatactaagcgtgcacatcccgatcacttatttcgttcccgtcgcaactagcatgcaggatgccaagaattgtacaaacatgcggtcgctccgctcggcaagggcaagagtttggatgtctttcgccccgcctggagcattgatggcgaagctgtgaaacccgccgagcgggatagacggatcgagagaatcaatatcaccttcagattttatcgaccagattttcatccccttaccaagggggctcagcaagggactcctttatgccgttgtggaattcctacgtaagctcagtggctgtcacccccccttcttgcttacggctcaccggaatctggatgtagcttgttgggtgccgaccagaaaggaaaggtcaaagccaatatgcagaaggataacggtgctctttcggctcgagtagatgacccagcggagagcatcatattcttctaccgatgccaatccactagtgccagtggggacacaaaaggctgcggcttcttccagctcttagactgtcagaaagagggcaagggccccttgattggtcatagagtgcgtaaggcggaacgacaggaggcatatcatcagaccctgtagcattacggatacatctatttattaagtacaaaggaacagaagagcactctcaagcttcagcactagcctcggcatcgatatcctcttcctcctcgagttgaccaacatcccattcaccgcaaacatcccagcggcttccttcggccgaattgctcaagtacttgacaaaacgcatgacgccgggatctcgcaagacgagcaggaacttgttgaaacccaggccgagatgcagcaaggggccgtcatccatgtcgccaccttccgaatcggtatcgaagtcggacggtgacagctgcgactcgtcgaattcgagctcgacgccacccattgtgattttggggccgtcacccttcttctcttgctcagcaggggtctcctcactcccttcagcgccttcattagcgagaccttcagtcttggccaccttggtcgacttgtagaccgcagggtcctcgtcgatatcaggaggtgcaagatagcactgacgaggtagcatagcgttaggttctaggaacactcaatatcgaacctgagcgtgcttacctcccacccgccgacgtcttgctcgtcatcgtcctcctcctcagtttcctcctttgcccaccaggtcaaacccaagaccccgtccaacctaggttcgccctcccgctcctcaccgttggcgagggtgtagtcgagacccttcctgaaacgtctagcttcggcacggtaggccagcacgacgagcgaagacacgaccgacagccatgctcggaaggcaggcgacgggtagagctcagtcagcacggatttgatggtcggagtgcgcgtgctggatgtggccttgctgttcagcccgacgtatcgatgcttgctggcaggtccttccaattgccattcctcagtttctccggtctcgtgcgaagggaccaacttgaaaccgtcttcaacgaacggtgcgtagtcttccgcgtcgactttggaaacttcggcctttatggcctttgcgatttcaggtttcaagaagttgtgcattaccacctcgctcccttcaacaaattgaccagcaagacgttcgagggtctcagagttcagataagacggcgagaggtaatttgagaggtgtttcagttgggcggcagtcaacccagtcgggggcgcgacatcggtcgggtacggaatcataggcttggggggagttgacgtctaagggcaatgactcttgtcaggattgagcaagaacaagtagatagtggcaggtcactcacgatctgcgccaaagagctgtgcttctgcttcaaggcagtcgtatcctgcttttcgtatccctcttcgccttcgatagggcgatggaacctagcacgcccgcatagtaggcgatcagcagccgatttcggacaggcgtcgagcgaggcagcactcaccatccattgatactcaatcgctgtctgccttcgccacctacgacctcctcaaccgagtggtagctcttaccaggctgaacctcgaagaacaccaagtttccccacttgacgtcctcttttgcggacctcttgatggcgggaggaccgacgtctttcgtttctccatccgcgatggggtagagttccaatgtaccaccccattccgacttccaacctttcaagaaagtcttgtcggccgaaggcaccaaagcggggtcttcgagctcagcagggctgttgggcaggtagaggatgtaggatacgacccgggtagaaatcgagtcgtcatgtaacaagaggtgcgaactggagaaacagatttaacgtattagcagtcggccctgaaacggataacgctagagattcacccctgagtgtaggtgctgacagacccatccaccttgaggccggaaagaggaccacaccctgtaactttctggacaaattgacggaactctctgcgaacaaattgatcagcaaactgaatataaatgctgacgatgcgggcctcacttggaatagatgctctccttgagcttgcaaaggtaggggagcttttccaaggtctcctcagggagatgttccgggtccagcgaggtcaaatcgggtgtttgtcgaatctggtcgaccgaaacgagctgaatcagcggctagtcatacgatcgagtgacagagcactgaccttgtagatgtccgtttccttgtgctcccatccccaacctggcagggaaccttcctcgtgacgctggccatagctacgactctcggttacgatgccttcaagctagccgaagtgatatatcagtattccggccacagaaagctcgatcagtctgagactcacgactgaatcatcgaagaggcctccgacggaaagatgcctgtaaggtcggttgttcttgtagtcgtcggcgagggtcgctggatcaggcagatggatggcaggaccagcaggaagccctgcagcgccgaccttttgcttcttgtgactacggtcttcggcgaccggagaggcggatcgttctcgggctggcatcttgcgtggacaacgagagtcaaagacttgggctgcagtgcgtcgagaaagatcaattggtacccaagattgtgatggttgaggacattttacatgggtagttgctgctcaagaaaattaggactttacctcgggcgagaccgttgagccttgtttcacgtaaagattacgcaatcgatgcatgacgtattcaactctacgaccagtaggtggacatcgtccaagactctgaataggatttctccttaaaagcgttataagtatctctctctcttatccatagttgtatctgagacgatcgaaggacgacaaggtcatcgggctcttcttcaatccgccatcgacgcatggagtttcgtggcatatgtggtatgtaatttcgggtcaatcgtgccctctgatccgttcaactgactacaatggttttaagcggcctttcgctctaccctctttaccgtctcgtccacctggaaaccgttcacctgctgcagatacgcactcgaggcgagctccaaactccagaggtcatcgaaatggttgaccccgttgtacccggcaaacatgatcagtcgattatcgtgcaagaccgagacgtggtaaccccgtccgacaggaatcttgccggatatcgtcttggattcccattctaacgtgactatcgggaggaaaaacgttgagcctctgatctacagagttgtttatacgaaacgggcttacccagattcaaaaagagcacatcctgggcatatttgtgtcctatttgagcagccaacagggccaaataagtgaacagtatgctgtacgtcggtcaacctcagttactcaccatcgtgtcccccaacaatgaagaggtaagatccgacctgagtagcagtatgtgacaagcgactgaattgtagctgagtgtgaaccattgtccaaaccatcgtatctgtccacgttcaacagctacacttcagtgtctatcataccagatggaagatctgcgagactcacccaagtccaacacgtggacatccgaaaaggagtggttgccatcacttccaccgtatacaaccatcttgtttccgatcaggttcgcggtatggtaacccttctgcaccggcacgtctcccgtagccttccattcctcccaggtcaattcatcaggatccgaaatcttcagggcccagacgtcattaagtgcagcttgaccgttacctcctccaaagacgaccagaaactccttgtactggactgttgtgtgcgcacggcgctgcagaggccagctgttcttgggagtgatgatgttcggcttgacccatttgctctccactattttggggatatgatgagctcggaggccacagtgtaacacgagacagactaacaagtatggtaagcccacacatcgttgctgtatgtaggtccgtctcctccgccaaagacatagagcacgctgccaactggagtagtagtatgcgccctcagaggcggtagacttactccagtaggacatagcctggcccatacgtgcgactctgcgagtaaatccatcagaaatgctggtcaagttggccggactgcttgactcacctgtattatacgtacagactccacgccagcagccctggcggtcacagcctcctatgacgtacaccttgtttcccaggagcgtgccagtatgagctcgcaaagacttatcgggggcttgcccttgctgggccatcagaccccaatacattgctggaggagttgcgcatgaactcagtctcagataatttcattcgcttcggacggagtcgacgcgtactcatccgagaagtgatccctatatcggctgcaggtatcgtgaaagttctctcccgtttgctgtccttcttcgagcttcgaccgtctcgatccttgtcccgatctttagccgtcctcgacgcctttccctcactattccgtttcttccgcattgcatcggcactgctcttctcccgtggatgcccagctcgctcggtctttatctctgcctccgacacattctccttctctcgttgcagtggaataggtaagcgacggacgcctcgattgggcttttccggagtttccgaatatgggtcctcgctaccactttgttcgattgcgctaccattaagcatctcactggtggatccaaatcgacgccggaggctggatgagttttccgtagtcggacgactggtcagctcagagtcggttctcaagctctcagatgctcggcctcgatgtttgggagtgcgacgtcgcgtatcggtttcaccgtcgctggtagccctgtccgaagcgctgtcgataggattctgagtggggacagtcaatgtcctgcttcgggaacggcctagagtcgtcgagccatcctcctgttccctgacaacccgactagacttgcgctcaggaggtatgacttcgggcggggcggccgatggtatgatcgccacggtgcgattccttgagtgcttatattgcttgggagagcgggtttcattgtcgctgctcgcaacaaaggacgacccctgcgcacgcgtaggggctgtcccatcgaagcctttttcctgcgcacgagtcgatagcgaagactggggtacgctcgaggacgatcgaagatgcccgttttgcgggatctgctgttctacttccccgtatgagagcattcttggtcccgttatcatgttactgaatgtctgactagatggcatcccgctctgcagagaccggttctgttctgtaatggcaggtgcactttgtgcgctgtgaagccctgcgggttgaagcctcggcgagacattcggcgagaccaagtttccagctgcatcacctgggtttggtaccctcacgatgagctttttgctttcgctggtggccccgccggtcttgctcatttcttgcagcaataaagtcgaattgcggcgagcaatgtcatgggacgcaggcgacaaggccgcaaatggcggtggtctggccccagccgacgtcccctgattaagggaaggccgccttctgatcgcgcgaatttcttgattatcgagtgtgttatcggcttcgaccccaggagttcgactgtccgtgctgttgtagccagtctcgcaatcagagatatccttgtccggatgattgcgttggccgagcgaaaaggcgtgctctattccaagagccaagcgatcgatgccctgtttggctttggaaaacgatcgcgtagtcgaagctttccttcttaacgatgtccggcccagagtcacgctcgtccgaccgccttcttctcgagatactcggtcgctgttatcaaaggaagaatcggtaccttcccgtagactataaccttctacggcctgcgagaaactctcgggcggcgagaatggctgttcgacttctgcttgggaggcagatgctgtgcgatctcgtctccgcctgaagaagcccgacacgctcatcccgcccgacttgctttccgacggacgatgacgactggaagatctcctcgtactgtcaacttcactagttgtccgaccttggaatccttgtgacccgtaatcactatcgctctgagcgggtccactttctgccgagacatgactatctgcagtatccttagatccccttcgaacttgaagagcctgcggtacacctgcaccaagaaacatgtaagaatcttcttgagattcgtttctgttccctgtggtgttcagatttgtctcgggagatggaggaatgtgtctcaaggtaggagggttgatcgacccggtgatgggcgtgactggggctcctgctacttgcaagaagctgttctgttggccagtcggattatgcagaccattgttatgggagacttggctcatagcggttcatatgcctgtccttcgggaggaggggagaatgtggggatttcaaacagccgagagggagatcctttaacccagaccgtggtcgtcctgtcgtaaaccgctactccaagcgaacctcgtgagatcgttacagtcgtccagatgcgcagggctgattattgaacagaacaagtgaccaagctagaaaggcaaacactgctatgccgtccgaaggtaaagtcctttgcgtcgtgcttttccgttttcgatcacaggctgtcagtcgtcctgggtcctggagattgtccagggatactcgctaagagcccctatgtatactgttgatccagctcagaatctatcgatatgtgtgtcgtctatcctctgttcgtgggcaggcggcctggtaggtcgaccaaatagagcgaccagttcgctgtgcacaacgcgtcgtctaaaacggcagctagccgaccgactggcgtgatgatggttgagcaggaataacaaatctggatctgcgtgttcgccgtggaagaatgatcggatcgtaagatggcgtggtcttggagttaccaccactttcgtcgaggggttccaggagagcttgtttcgtgtgcgggtttcagcggtgtcaatcacctcaccggtcccgtagctatgttaggtgccagtcgtctcaaaatatgcttcattctcagctcctctgtttgtaaagcacattgagtaccatgtagagcttgataggcgaatgatccagatgattgaagagtctgttcgtggttgagaagcacagaccagctagctagctgtcctcggtcgtgatcggtcggggtttgacgaaattggttccggtaccgtacatcgatcaactactaccgactgaatgaaatcgaaaatgggctgttctactcagcccagtgctggcttgctatgttacaacaacgtcgaacagcaatctggtcgactgctggatttcactcatagtatggcggctacaagacagcctctcaatccttcttggattctgaagcgtcgcccttggtctcgcccttctttctgaaaccgaaattcaacttgatcttctttcctgcgtccttgacggccgtactgatcccgccgaatctctctttggtggatgggtcctcggttttgacggctcgcggtgttcccggtcggcctcctgacatgagatttgccaatccatcctcgtcttcctcctcctctatctgccgagcccgtctcgtggcaatcctcgccgccatttcccccaggttcttttgaacgatggagccctgggctgactgctttaccacccggtaacccactggcacaccttttgccgccgccgaactctgatcgttgggaaatgcagaccggtctaacgtgggccgctctcctggactatcggatccgctacgttctggaggatccttctcgggtcgctccgtatctgaatccgattcatcactgtaatccaagctaagagatcgaacggatccactcgacgaagatgcgggaatctttcttggcttggtctcgcccttgactcgtttgcgcttttggccgattaccaatgattccgaggtttcgtcggaaagcgctgggagcagcgtctcttcgtccgtctcattgaaataatcctcctcactgaccttcggtctgccgtacagtgaacgttgagtaagaagcttgccgacacacgctgcttgaatccgttactgttacttacctggtctcttccgctggtgcagctggttcaggtggaggtggttcgttgttctgctcccatcgtgtccgtaaggcgttgatgacaccccgtagattcggcatcgagctgagcttctgcagtttcgcatcatatttctcgaaaagatgattaatgatcgccttgacattgtcctgtaattaggatctatatcagctgccaaatctgatactgcggaaacttatgagactcacccgacgtatgagctcaaacacgtccagacaagacgagcatagcatgttgtcgcggggtccttcgatttcaagcatctcaataagaggtagcaggagctcgttcttcgtaaggtggcgatgcaagaaatggttgttcgctttaacacaagccttgaagaagcggatagcagctaaagagaagaaagttcaacacgcagtcatgcttgaaggggcggtataacaagactcaccgtgcttcagcggcttttgcttcatgtaagcgagagaggcaacccgtgatgcagtagggttcgagaggataaagtattggacacgatgtccatgttgtggaattgctgtggccatcaattccgttaagagctgtataagagccgcttctatggcattcagatgcaccggttttgctgtcaagcggaagaacatcagctacacgaagatactttcgcactcagccaatgcttacctttgtaagccttgacatcaggcagagtcatgaggggtcgatacattgacagcgcgatagaatcgtaaaagtacgcagtaaacgtatcggctactacaccgcctttctgcgctcgcagcgtagggggctgcgggggtcgaattgtaagtaacacttaatcggcttaaagttcctccttgaggtcgaagtgtactcacgtccgttggatctagacccacatcaaccaaagctcggatggcatccgacatctggcttttgaggccgaggtcttttgattctaccaagagagcgcagatatcgtccgcgatagtacgcctcttggcctcgtgctctcgtaggcagtaagaacgaatcccgttgaggtcatgatccaagatgagcgagatcatctctgcgccttggttgatgaccgtcgtttcgggcctttgcagggccaattcgcagacatagagcaggcctcgttctagcaagattttgtacaacgccaatcgatgttgtgcttgtacttgtttgcccataagcatgagctgatgcaagaacgcaacgatgtctcgagtgcgcggattcaatggggatgccgggatactcttggtcggcaaactcgggggtaaattcctttcgagtttcatctccttgaagccttcgaacaggtttcgaaggaaagtatcgttgttgccgatatgtgcgataatgtcgatttgattgaagaataatagcgaatttaggatgttgaaggttggatcatctaagacccgtgcgaggataacatccttgaggtagtgtaaccggtatgtctgatgcaccttggataggattgcaggatcactgatgggaatgacttccttgaagcgattggtttccgtcaaaaagtcgcggtaggtcgctttgtatttgggatactccgggtcgtctattaggattagcggctcgcaatgtcagcacactatgattgcacgcctgacacgtgacacatgcaacttgcattccatgataccggcgacaccgacgaatatatcctcctgcagcaggtactcatacaagccgttgtcgttcagtgtcactaaccaaaagaagaggatggcggagtcagcacgtaggagccgaacgcagattctttcaatggcttacgaatgattgtcatcatgttgcacaaagtatgcagatccgagatggactccagatcttccgctgcatcgaacaccttgatcatctgacggacatagtcctggaaagaccacgacgtcccagtgtcagcatgttgagcattgaaatcgagggccgatgatctcacattcgataggacgaattcgacggtcttctctcgtccagcgatagagcgtgtggacgccctcaagctttcagattgatcactgcccggagcgatattagctgtgttttctgacgagaccgaagcgatcacaagcttacgtgaggttgctcagctctaggggagcccatccggacgactctcgctccacgtatccagattggactgcttcaggagcggtggcctgtggtgatgcaggcgcaggggatgacgatgatgtcttcgcgtgttcttctgcttatataagaaatgattgaggcggtacgtgagcgctgtgaaacagggtcatacgaaggtgtggagtatgtaccggataccaggatgagatgttgctgaacttcgccgataaattcgcaaatgttggcacacgcagccgggtcttgaaaggagagagcgatctcggtcccgtctggctctgtccaaacgatcagtgtatctgcggataaacggtatttatcagttcaaaatcccttcgttatacaggagagggaggaatgacataccttgttgacgggaatactggccgcctttgctgactcggctccgaagtagatatgtggggttctcaggctcacgcaggaaaccacccggagcgaccgaaccgcccgattcagcttgctcagcggactcatcctcttcaatgaccatcagaatggcttcatcttgctgttgatcgtagatgccctcgatgaaacccgttcccttgtcttcccagctggagtcttccaaaaagtacacctgtccgcaaatcctctttgagtcagatagcccagagttgcgacagtggctaccatttcataccttgaccctcttgttggcttcgaacatgcgctggtccccctcgatatccatatcctgctcttgcgtgtccgggttcacgacttcttcgttactgttgccctgatcggcctcgggcttctcctcttgcaccttcgggtcggcctcgatcacaacatcctcagacttctccgaaccctcctcctgtatttcggcatgttccatgctggcgatgaagccttccaagggaagctgttgccgtctaggtcgtgagagatttctaacgtctaagttccttgttgatgaatggtcatcgtcaaagcggatatgagaaggcgagtggtaaatgtcaagggatcctttgtcgtactaggcctgatctactgaggttatcaccagtctgttactatggtcgaagctggtaaataggtctctatgatctcggctctactcgcaagatatgctcgatcacgtacagaggtttgacagaagaatgaagccgaaaggtcaccggcgggtctctgggtgatcacctagtgacgaatgataacgcgacgcgacgtgaccttgcaggatcttggcgagactcccttcataagctatatgaccatttgcagctacagcattaccattccaaacaagcctgtacaactgcttttgcacgaaagcgatgcttgtcgaatggccgaatcacattttataacgagacctgaatttcgcctatgataatggcctgggcgcattctcctcttgttagcctttccgggccagccgacgtccgcatcggcagatgaaccagagcattagctcctgcaagactagccactcgagagctcctctgtccacctgtggtacgagccagaagcttgggagtgccgtcacgcatggtgtgatatacgatcacgcgatggaactcctcccgcgagtccagcatcatatccgaatccagctgcgaaatgcattatcagcgcttgcaggcctcgagtgcatcgtccgccttcacctcacctcgacagatatttttggcaaatgtatacggttgtggggccatccgcctaagcatctcaaagcgggcaagacgaagaggtagaacgtgaccaaggccgatgcaggatttcccggaagcgcgaaaactggtttcgcggtaccgtccttcatggtcaccgtggagaaagttgtggctgaagccctcgaaagtcgattcagattgcgataaaaagagattgattgatgagacgtcaatacttacgtttcccgggtttcatagcgactcggccgaaatgtacggtgccgttcaagtgatgctcgatgatgggctggtgatcgtggacccgtcagccgtcccgttccatctgacaaactggtatcaaccgcaaacttacttttagaagatcggcctctcccatactagtgccacctgtagtgatcacgatatcggcatcctcaagacccttcctcaaagtagctgtctgtgtttcaaggctgacgaaacccactcacaaatttagtaaccatgggccaaaatcggctttcttactcgcccgacttacacatccgcggcaatccccaagtcaagtacttcatatcccaatccctcaatcgtagcccttaaagaaggtctgtttgtatcaaccacgcctgtccatgcagcggtcgaagaaggttttggctggtccaagtcgaccagctcgttccctgtcgacaagatggctattctcgggcgctttatcacttgtaactgtcgcgacgcggaatcagccgatatgcgttgccgatgtcttggatggaggagcgtacctcccgcttgccaacaaagccgagcaagccaacttctcccccaccacccccgatgacggtccccgcgtcaagaaccttggtccccttcttcgcgtcgcttcccgcttggcgcacattgtctccagctggagtcgtacaaagcacctcgatctccaattcttctttcccctccgctgttttgtcgaaatccacggtcagcctgaagtcgcatgtaagatttgcaagagggaacgtttggacgaactcttggtaactttcgtgtcttctaccatgacaacagcgttgcaaccttcgggcaagggtccacccgtattcaccctgtaacatactaggccctcgtgcgtcgttgacgatccagccttcatgactgaaaacaacccaggctgcaattcagatccagttacaaacaccgcatagccgtcgacgttggtcgtcctcgtaggcggaagatccatttgtgccaggacgtcttcggcgaggacatggttcttcagcgtatggtccacgcggaccgtcgagctcggcagcggtttgacggtgttaacgatgatttcgagcgcttccgataaagggatgagagggaatggagaacttctctggcgggatgagactagtgcaagtcctcgcgttcagccattgtcgtgatatgcagcgcacctaaacccacctgaggcagaagggtccttgcttaaagctgtatgaggcttggtgtgtctgtgcttgtgttcaccgtgctgatgattgtcgtggtgatgatgacggtgatgatgatgatgatcgtgatgctgatggtggccgtgctcatgggtcgaaccgctagcattactgagcttcacggactccctggggggatgcacgtcctcgccggaaccgcctcttagcaacttgaaaccgtgacttaacgctttcgttatcggctacattcaaaagcccgtctcagcgttcagcgttctcagaggtaggaatcgcaataggattcacctcggaagtgagggcctcccatgtctcggcacaagctttcttgctaccgctgcacgcaaccactagggttcgatcgaggatgcccacgaccggccgagacagtatcgacatgggcgttttctccaggaagcttgcggacagatagtggctcagtgttggtagaggctccaatagtgggttgagggcctgtgagaacctcgccatcagcttcccgtatagagcgagacgaccaacccgtaagcgacctgcctgaggggtcacatcccgttgtccccatccggttcctagacatcgagcagggagtctttgttcagcaggcatccgagagcgcccgaatcctgcagcgtacctcctgttacgatgatccagtctactttctcatcgccttccctctgactccattgcatcacctggctccggatgcgagcgatctcgtccgggacgatagcgctcgggcccggacggaaggaagcatgagcttcgatgcaagagcaaagatgaggtccggcaacatcgtattccttccccttattgtaagcggtgtccgagactaaatttgagagacagaaatcaggtgatatacagctgagcagacctctacgaactgatgtttaccggtcaagacggcgactctgggagcagtcattcttcagtaatgctgtaccactagtttgtaggctatttgtgtgcacccctgaaatgacacagctctatcacagctgaaatactgacgcactgattgatgtcagtcagctgagaccaggtcagtagctagtagaaaggttgacgggagagccgagtctatcatggtcccaggtaagatatgtctcacgtcatgttcaagttatcagctcccgctcgagcgaatcggaatcacgccgatcgtaacgaggacgggcagatgaaccatgaacaaccgtgtctcgtccaacaataagtactaacgtcaagcatctcgacaacgatccgattgtatagcaaaaccgcatcaacatgggatcttccagcagcaaaggagcacgtcgtctcccccgcgagctatcgaaacaggctgaacagcgagcttccgcacccactgcagccgagcagtttaacaagaagttggccgatgttagcagggctacgaccggaaatgtagattactcggcatctcgaactactggacccggaacagagcacgcacgaggccgatctaatgtctatgcgagtgaagagagggacgattgtgagtacgatcgcccagatcggcaacaatggtcatagctgaattcgatcgatctgtacgtcttcagctatcaaggaagacggaggcgacccagatttcctgaaaaacctctcaagactgggtcaagtatctgtcccaaaaccgggaacgcccttcgaaagagtcagtcccctaattcaaacggtcctgcttgtgactgtcgcggcgatcctgatgagcggttccccgactacagcaagcgcccgcccttcgaacgctcttatcccggaccgcgacatccacttcgtccgccgctcctcctcagaatcacctttcggcagcatctctctcgaacctgctagaccgtctgaagtcgctcccggcgaacgacagtgagacgccatctgaagccgaactatccctttaccgagattacgctgtgaacccggagacgatgagaactctgcgaagatggatcaacagcccaagtatcgatccggaaaagaccaagattatcctctcggagcaaggagaagaatcagtggagatgacggtgagcaccatggcatagaatcacctcgatctgtgcccgtaagaaactgaatgtccatcttccatctaccaggcggtctgggttagcgctgcagcgacggagcaacagaaggtcatccctcccggacaaaagacgaactaaaagtgtattctggaatatcatttatgaatcgacatgattatggtggatgatacactcgtgatgcaaggcgagaccaattacaacctgttcatttccgtcgactatgtcgattcccccatcgcatcgggccgacgccataccaccaggtccataccccgatgagaccaccagccatctgcagactgccggcaacggcttgaaaagtcagccatcgacctccgctcgcattgagcactgctcctgctagagtaggtccgctcatcgaccctgcgagcgaacaagaatcatcaacctcgtgcggtcacttggactgatcacagacgcgtcttacctggggcagaggatagcatggctaatccgacgatggaagccatgttctcccttgcgccaaagatctgtgctattacaggtgcgatcaagctcaaggctgccccacccgtaagtccgtagatgaaggcaaaggccaagacgccctcgaaactggtagcgaaatgccatgcgacgatttgaagcagtccagcgatctcgagcgagaggaccaaactctgtatggagcctagtcgatctgcagtatagccgataatgaccctacccgtgaataaccccatgttggcgcaaaagagaggccatgtggacgtcagggggccgatccttgacgggtccattctcggcagaacgacatcttcagcgtaagtcgtcaagtaggcgaatggacagagatatccgctgtcaaggggaaaagtgtcggtgttcgtgcgtcgctttgggcaacccgagcgatcgacgtagtagcagactcacaagcaggagacgaaaatgcatagcaaaaacgaccagaagacgtggtccttcaacagaggtcctactccaggtcgtttgacgagctcaaatttccgctttccatccggcccacgcttgatcagccgggtcaagtctggcgtcggccggttctccctcaacaacagccaagcgatcgtccagacgatcgcaagtatgcccgcccatatggcgagtggcgttctcgattgtccgaactggatgatcatgttcctcagtccgtatgacgtcaaggcgccgcctaatccagcacttcctccgacgagacctgataaatttaggctcatgagcgatactgcgaaagtcgagcaaatcatttcatttactgacctgtggcgagtcctcgatgctcgaagaaccattgactacgacgacgctcttctatcaggactctccttgccgaccacttagtgaggtcccgatactcacctcggaagggacagaataagcggcaccacgaaagcttgcgccacgccatacaggacgccctaatgacgaatgggcgctcgacttcagctcgcgatcacgcatcaggactctctcagcttgaatgagcgacggacctgcgtgagaaagacctgccatagcttggtagcgaacgcgtccaagaggatcgcgatcaccccgaggatgctcccgatgaatatcgtaggctgcgaaatgcatggtttctcacttcagcctgtgtctgactccgtatccgtaatgtccatcgatttaccttatagccactgagtcatggtccaacgggaagataatagtcagaggaaatgccgatccgatcgaggcggcatcggtgacttacaagctatccgcagctctacccccgaaactcgccagtccggtgcagcactgtaagtaatcgctcggattaagctgcgccgtagatatcaacctcttatgcttagatcggcgagggcttacaaatgcgatcagacctccgatcagagcaattacgctctccggagtggactggtagacctctcgcgagtagtatgtctgaagagctcctactgacatcccgaagctggtcaaacccgagttaagtaagctgagcaacaacaacccgactatggaaccacaagcttaccccatattgctcactatgagaaaagagaggcttgtaagccgatgaaaatgagacagtcgggtggcaaggacgaacttgctatcagaacgcatccgagcaggactacacaccccctcaaactctccttgggtggatccggctcttgagggtcagcaggaagacctccgcctagagaagctacgacactcgtccgggtgttttgtctttcgggacatgcaaagtccggactgaggtatccctgagagtctgtggtttcctttttcaacccaggagtgtactgcgattcagtgtcgaggagcggcatcgcgagatgcagttgtgggtgcgattatacgagcgacccgactgggatcgggccacgcaagagagatgattcgacaaggcttgatatcgcctcccggtgggtgcataggtcaggggggtcgtctcgaaagaaaattatcaaccaccgttcgaccatctgatcaactggacatgggaactgtgaagcgaatcgtaaatcttcgattacaagacgctgacggaggtatccggtatataacctgaatccctggtcttcggtgttgctcatcgaagttatgaaaccgccccgcaccggtccggggggaacggcatcgatcgctggatccaccggagttggccgagacgcgcgtaagcggagctgcgcttctagttaagcgcaatattgacgtgactcgacgtatgccggcttcggaactgtggaatacactaccagcgatcctcactgtcagtagtcgggtgtgaaacgcataggcatatctacatacgtatcttgaacgagacttgaggttgtagcgaagactgtgcagatttcacaagggaacgtaaatatcgtgctcaccggacttagacgccggctcggccacttcaggcctcgacccacccgaaaatctcgcgttcctgggattcgtcatttcacgttgtccccgtgaacaaaacttcaagacgggattgctggatagcgatatagtcgtgctaaccgtttgtgtctttcggagtatattcagtcggaattctgcgtgacgaggacgtacaatcgtaacataagaattcagccaatcgatcatctagaaacagagccctttcagaatgcccaactcgtccaagatgacctctggaaacttccggaccacttcctacgttctcgccgagggcaataccatcaagatccactattatcgatcgcaacccaccaagtcggaggagaccgacaacgttcaacgaacgcccatcctcctgcttcatggatatcctcagacgtctttcatgtggaaagaggtcgtgagggaaatgagcgggcaatatgatctagtcgtacccgatcttcgaggtcagtcggcgtgatagctcgagacgaggtccaaacggctcatgtgaaccgcatttcttccccaaattcaggatacgggaggagttccaagcctaaaggtagcgagacacacgtagaatacagtaaacgggaaatggccaacgacatggtcaacctcatgtgagcccttcagagcctcacgctcggacatggggttggtctgacacgattgacatgcaggaacggccttggactggaatgctttgacttggtagcccacgatcgaggcgctcgggtggctcatcgtctgattctggatcacccgggctctgtgcgaagagccatgttgatcgatatcgcgcctaccttgacaacgttcgagtcgatggaccaggattttgtgagtcagagtagcagatggctaacgtaaagcgctggctgattgataccacgttgttggttctaggctacgggatagtacgtggattgaggtgaagctgatatgggtcctgcgctgagaccatttcaattatagctggcactggttcttccaaattatgcctagtcctctttcggtaagtattgcccaagatcccatggccatcgtctggaaggtgctgagagcaaaaccttcgttaggaaaacatcatcaagagcgccggccagtcttattgggaagcagtgacccataacgctaaagcgggatctttccaattcgatgaaggcgctgaacggatgtataagaacgcttaccttacggacgagtcgattcacgcggtgcgtaaccaaatagccgacttttgcgatattgggccatgctgaagtgtcgtcctgggcttagacgtgtgaggactatcgagctgcagccagtatcgacctcgagcatgaccgactctcgcgacaagcgggacagcggatggaagtccaggcactgcgtatcatttggggaggacggggacaggtcgaaaagacttttggggaaaagacaattcaggtttggaaggactgttgcgacgagaaaacacctgtttccggagagaagtacgatgctggtcactacataccggaagaaaagccagaacagctcgtcaaggatattatcaagtttgtttcatgattcaatttgctctgctacttgtattattactggacatctatcgttatacaacttgtaaccggaaagttgccacaattgagatgtgattggtgaccaaatgagcttagtcaaagccggagaacttgaatgagatttagagtcagcacaaaagtagacaggctgacaaacgcatgtgtttcgcctcaccttgacccaatcatcaatgtttgatacggtactcgaaccagcaatctcccgagcctcgagatacacccaaatctttaatgcgaaagcagctcggccaggtcaatcaatatatgcagcggtatggtaaacggctcgacttaccttggccatggcccagatattacccttaggaacctgagagatcgcctccttagtacccatctgtcgaccgagctgacgcagtattgggagagcacttttcagcaaatctaggtcatccttgagacgtcgtccgataccctctagcaagaggatagaaatgacagtgttcacgaaatctccctctaatttgacgtggtggtcccggacattcttcaatacgtcggtcaggatatcggaaatcttgatggcagcgagagagaaagttgtcgacttgacgcgaagaaccaggtgctggatcttcagagcaaatgtctccgcatcgagtaccaactctgggttgcggcatcgttccaccataaggtgacctgccttatacccgtcgaattcggcaatagcctggaataggtcgaggaagttccgtcggttcgtcggatccaaggtggtgaccagaccagcgtcgataaagatcaattctggctcgtatccctcggcagacagtcggtctaattcggctacccattgctctgggtcgtggtgaactgcgcgcagtcgctgcacaatgctggccgtctctgtagacaacaggggatcggccggctcaggagtggagaatagctgcgaggcgaggtgctggaagaaatccttggtcgtcgctttgtagaatcggatcatgatattcccgctgcgattggttttgtcagttgaagcagaaggcgagcagggggactcgaaagctcacggatgcaaatcgccatgcgtccaattgtctaataacagcatgttctggaaatgagagcagagtgcacatcaataccgcacttgcaccatcgatcgaacacggctcaccaaaaaggcgtcgagaccagcattggcaatcgctgcatcgtactgccctccgccgttgaccaagaaatacttcagggggagagcgtcctcgtactcttcgactaatacctttcgagcagcttctccggtatgctctcctttagtccgaatcggacggggaaagctgataccggggccacgatgctcgaagttattgatgaatcgctcgaggttgttggcctcgacgcgcaagtccagttgcatattcatcatgtcaccaaagacgtccacttcctccggtagggagagccattccatgccagggaagagattgagcacattggcgaaaagactcatgatcgcgaggtcccgacggatgttcttctcgacccgcgggtgcacgaccttgacagcgaccgaggtgttgacgacctcttcaatgggaatgccatctttggtagactttttcgtcctctttgccataaacgattctggcagcaacttgctgttaagtttggcccgataaacttgggcaatggctccgcacccaatgggttcctgctcaaattcgtcgaagatctcatcgaacgactcttgaaaggcctgttcgagtaccttcttcgtatatgatagagcgtgagggtgtccgttggagtgtagtttgcccatcaattcacaaagggaggccgggaataaatccgcccgcgaagcagcccattgaccgagtttgatgaaagtcggtcccgccttctccatctgtctgactaggaagccaaaccaccacacggctccccaccgctccccctcgtccaggacaactccagctctccgcctcttggatgctgctggggtgcccactaggagcattggcgcggtcaagatgacaggtccgaatagcatcgcgagtcgcaaaaaccggaaaaaggtagaaattggctctaggatatagagcttgatgatgcgaatcgggccgaaggttacttcttcctcagctggtgacgaagcaaccactgatgaaccgccgttactattgcgaccgccatagttgtctccgcgaggaccctgcgccgagttcgaccctttgccattgctcgacattgtttgctggacgatatacgtcaggccgcccatggcgacaaacaccaagccgaccttgcccgtagaaagttgccaagctccagaaaaggccccgtttccattgcctctgttgtcttccgagccgaagcggaaatcaccgccagccttcttcttgtcccagtctgcgtcccgccgctttgccaactcggcgtgaatcacaagagccgcatcgcggtacagctgatcgagttcattgcggaggacaacgagacctctccgtgtaacctgaggtgcttgcgcgttcatccgccggacaagattgttcagactcttgatgtgctcctcgtgatatgccttctccctcgcttcccatcgagaatcccgcagttttgtgatgtcctcaacggtcaacgctgcgagcgaggcgctatcatggtagggtgatgtgaccaagcttcgcacaagagcccgactgtatgactccatcaggttcgacctgaaactcgcatgagccgaatcgagctctgcagacggaccagacgttaatgtatgtcagtctcgtgtgcatttacaaagcgactgaccattttgcaattctatccatggtggtttggctccctgcctcttcataattcgatttaggtgaaattctgtgcgatccatatgcaagagatctggatcctctttcatgggtttgcctcgaccaggaacgttcttgaaccatccagcttgccgagcttgctgtaaagagccggacggacagaaatcagtctcgttttgcaaagtgcctttgaatcacataaaaaccgagactgacctgtattcgttcctctaccagcccttcccatgcccgcaaggacgacaagccctggacccttccgtggctctccgtcccttgctttccgcccacctggtaatctagcgctccctcccgggcaccttcgacacggccgacaagcttctccgtctgtttcatctccttccacgctttccgatgcttggggtcgttcgggttgaagccgaccggtttgtccaggagggacatttgcgaagtctgcgtgcgactcgacttctttgcgctcgaagggaggaatttgccgtagagcacggagggcgaaacaccgggtgaatctcgagcgacgtagcgtgccatccatggtttgaagttttccggtgggatatcgcgctcagcaaggatggcgtctgcaagtggtcggaatggtcgcccggactcttcggcggtgctagactggctggactggttatcgccggttgtaggagatgcctgagagttggctgaggatatagctcggggcgacagatcgacctttttcagagcttgtttgatcttctcttcggctgattgtaccaagtccgagcgtaggggtcggttggccggagagtcgacgagcatccgtaggacggcatctttctgtgactcctctcccgtccagaccctgccaacgagtaacacatctcagcagagcttcacagcgagtccgaagctacagtcggcactaacggtgtatctgcggcttccttttcactgagctctctccaatgctctttggctttgacggtctcttcctccaccaacgcctctgccaacagttttgctgatccggtgagctcctgttcgcgaacggcatccgccgagtcttcttgtatgagctgagagttttgttcccgatcgtgtgtctcggcgagcacattcctcgttgtggcgagaaagcggctgctcgaccggttgaacgcctgtagactagtgacatgaggcgagcctcgtgacagttgaagcctgggcgtcaggacccctctgcaggctgatagcctgaagctcatggctgaaagatcgagtctactgattgctccggattactcctgatccccccggtggtttagtgagcggctggctcatacgaaacacagatttgtccagaacatgatgtaatgtcttgtcagaagtatactcagtggcacggtcgagctaccgctgaggggcgatcgacgatcgctggaaatcgagattacgtcatccaaagttcgaaataggcactctaggtatcaagcgtttcagcgtctcgcctgccctcttgcgctctttctcttcttgaagcgcaaaattacatatttgatgcttcatggaagtcaagagagcaagttcataaagccggtcgctgagtgagcatctctgaaggacacgagcttgagttcatgcagtttgaactttgatatccattctgcaatcggcctggtgagcgtcccttctcctccccatctcaggagggacagctagaggcaagggcaacaggacgggcagatcgtcgtaatttcttgtcaaatatcgctttcacgaaaggtccttatctcatgactttccgcacttcaagatctacagacaacagcaaattagacaagttgctgtttgtgcgattcaaggaattctcatcggtcattcatgtattctatttagcagcaagagcagaatttgttttattgtagtcggctagtattgatcctaagccgcttaccccctcaatcggccgtttggcatgaccatgtcaaccaactggcatgttggagccctgtcctcttccttcatcaaaagattcgagtttgggttccctgtcgccgacttcaagtaatcgaggtccctaagcttgaccgtttgagactgctgctgaatgttcctctgaggcgtcgctgaatctatgttttgttgccctcgagtaatgctaaccaaccaaggttgggtgccgggatcttcctgatttctcatgataacgacactacctccatcaggaagatcagtttgggagtagtaaccatagttggtcgttgccccagaaggatcccttccacacacttcaaagacggtcggctagaagctagacgtttgagaagtagagggaggttgctgggaagagtaggtcatctttcttcgtctgatccgcgtttcggtgtttctaaacgagttgaggggaattgctttgcttgaccagagggttaacacaaacgtcaacgaaatcagatggaaaactctcagcaatttatccttcccccttacgtgctgtcactggtaatccgagattcgagaaggctaatctgtctgttctccctttgtcccgggctcgcgacagatttcgtcatcttgctgatctcgtgatctcaaatgggtctgccgctccaagctgtcgacttttatcaaatattttccaaagaagctgcatctatataccgacctttgtcaatagatgacgtgctctcataaatagtcatacgaggttatctgacaggacacatctttaacattactatggaattaatcacccagcatcggaaggtcatctgacaagccggctcaagagcgcccgattcccagtcacgccaacggactttggtgacgacacctgcatacgagggttttatccttcaactgggtatcataccttctggatgatcaatcagtttcctgatcgacatcgtcttcaccttcttccacagaaatcgtgggtatcccggttggtctgcgagttcaaatctaccatctgcctgtatcccaaccgtttgtggatacatgacgctgcaggcggattctgagtatggagagccgcatttgtttgcaacttctctggaccattgtatgctttcctgatggacgatttcttgccttccccaaagatggacttccgtcgcatgggcttgccaatcgtctttccgacctatttcataaacggatcaagccaacaaggatacatgataatactcatacaaatacctctaaggctaaaatgacagggagacactaggatcgccacaatcatgcttcgacatgatcagtgtattttagtcgtctttccatacaaatcccggcaagcggcgtcgcactggttcaggaagtccttcagtggttcacatcctatcggtttgggaccgcccatgaacttggcccaaatgctggacgtcccgccagcaaagtcgccgtccgaatcgaagatcttgctccagatctgctgaatctcccctccaacaagtatcgccatctgttcatgcaatacctgacctttgcagtatccagaaggaattctcaattagttcttcgtttttatcaacctcaaggtccatccgggctgggaagtcttgtactgagcctctactctccatgacgcccataatgaatgatcgtgcggatcggcgaggctcaaagacctcaaacggagttcctttcccctgtaaatcaagacatcattttgcctacgccgagatttgactaaatgtaggatggcggaaccgtcacaaccgctttcagccgcaacggagtggtacaattcgagcctcctcggatccgactcggtatcccacgattcctcaagccatctgctggaatcgatggaccagccggttacgctgtcattggtcagtgggcaaatatctcgtaactcagcctcggtgtagaacttgcgcacgtgctgtaggccgctatggttattgttgcttgtttgagcgtttccgacctcgagggaagaagacttagagaataggctcattctgaaactgctcggatttagcgctgattcactactgcggaaagggtttgcacgaagctggcttgggaaggtgttcacgtcagtctactttcccatgaataccgcctccatatagatacttgtttggtgtcgtggttctgccttaagatagagacgttgggagaagcacacaaaggagacctggtagcaatcacattgttcgacttctctcatttgactaccccagcgggcgacgagaaaaacattccatctcagttttcaactctctccatgggtcagctgtcggagtgcatgcactggtgataggcggaaatagtgctctcaggcgaacctatttttctcctttttctaggctgggtagcggatcgacgtcatatataatgattttggccaattgcgacaagccatgattccgagtctgctacgagcttacgacgggaaaatccgcgatcacgagctttacagccaggtatttgaaacatattctcgctaccgatgatatacagcaactaattcgataacatgtcacaatgctgtcctctatatcaatcacaaacaccggtttcctggctgacttcgttgtacgaccgaaggcactctgccagaaacgtgttcaatgtatcgacccgctcggtatcgcctttcagacagcgggaccaaggtggattgtgcctggcagtattcgctttcgacattcttccatcgtgacgccgcgagacgagtcgacggtttcggtgtctttagaattccactcaaaaagaccagattgatctttgctttggccggtcttccatacggtgctgttcaagttgatgacccaagtgagacacgtgcggtccatggctactcgcggtcccacgcgaactcgccaatggatataggtttgtgtccccctgtctgctgtgtgccctggggtcggaccattgaaatccaggaacttttcgaacgaatcgctcgcgccctttatatcgtcgcacttttgccttgctaaaacttcgtcaacgacttcctgtactgagcttgcgacactggtacacgcctttgattgagcttgtgcgctactacttgacggatagtccctgtcgtagatcgctagcatagcattcgaaagcattcggagtatatgtgattgcctgtcgagaggattgcactcttgtcgaatcagctgtagctatctcactcaatgtgctgctggcatcgtctatggcacgtctaccggattcagacccatgttcgtcggctgagtaatcggtatcagtagaggtcggaggtgcagacgtaacgattgattctgtcgggtgacagacctatttcctaccatcgctttctcgccgaggaccaaaggaagtcggaaaatttttcatgtcgaaagatcaatgaaagggaaaggggaacaggacgctccaatcgagtggaaatgcgatcaatcctaagctatgcgttatcagcttcctcgtctatatatgtatatatatatcacattttcatgggggagcagcatccagttgcgcatacgaggcatgattgttacaaatgatgcaatcctcctttgtcctagacgtcagcagatctgacgctttgtgggtcccggaatgccgaaagacgacagccggaaagggctgtcgacgtgcttgtctgcggcgatcaatgctgccaacgtggacttaattggctcgaataagcagtgtttgtcataatacctatactgcctgtcatctcccttacggctagatgccgcctacctctgaatgcagtatcaaaggagtcagatccaatgagacatgctaggtcacgccgaatcatgcgggttcacgagggcctcgattgcgcagcacggttacgtgtaattgatatcacttggcgtcatttggtctttgcttaccattctcacacacctcctttgcgcaatcatagcgtataacaaggcgttatcaatgagcaagatctttcgggaacactgggtgcggcaatttatccgattcggcatcaacacgaccgttatgctctacaggttccggccgaacacccgtacagtacacaccttgcatcgaaattcgcaggtagctggttgaggaggagggacaaagcttctacgatttctctgcgcattctcttcaagacatgatgggaatcttctagagagcaatcaaattttctgaatcgcatcgtggcagtcatacgatcgcactggatggtgaatcgagtttgcagacctaagggagccttcctattgacctagctccgaggagttatcgcggacatatctcacgaaatgcctgaagaattctcgagaagtgtgtcaggagcacaacaagatacgctcaacgtgtcaattccttcccgatccgcctcgtaaaggtatctcgatccttgtagacttgattgttggtcgacttcacgtacctctcaacgttcgcccaatccgcattgttcagctgccaggtcgcccattcctctctgaaaggtccgagatggatctgaatactctcgattgagactggagaccaatgtccgggcagtcgaatccgaacagttagtgacgatcgtttgcgccatgcctaaattttaagcacagtgcacaaggcgcgcacggggcgttgtccggctgattcatccgtactacaccaggaaagtgtatcaaagatatactgccgaatgatcccatgcctatgagtccagtaatatcgacgatggcaaggtaaagccggacaacgtcatgacacgcgatggataccggataccgatctcgctcgtctacactcgcgctccttttgcgtttgacccatttgatacgaaacgccatttttacctcgggcgtcacgtgaaactcaccgcgtcgacttggtgcgggacgtacagacacgcacaacaacgatgcagccacaccgcattgtctcaagtcccaagaatcgtcagatgatgataaaaaacagctaatgatacaaaggaaagaagcggaccggactctgccccttgcccctatcgagatctgccgtctcgaacgcaaaggggagcaagggtgggaaaagagagcctttgtacatcatcgaccaatcaagccatctttttccttctataacgaggtgcgaaataatatagcgtgttgcggtgagggaacggagatgggggtgggcgtcggtgcagctgtttctgatgcgtttattgcccttttggggtgtcgagtgggtcgaaaagttgagaaaccgggaaaaaggaggacgtaaaaggggacgacgagcgggtgggagacgaattcgtctctctactcgaaagtcatcttcttgccggcggactgaacgataccgccagttcggggaccgcctcgaggagcacctcggccacggccacctcctcgaccacctcggtcgccacctcgaccaccaccgaatccacctcggccgcctcggtcaccaccgaatccgcctgaaagacaagcaagatcgtgaaatggtcagctacgtgttctagcaagatacgaacgacgcatccacgaagactcacctcggccaccacctcgaccaccaccgcctcggccaccgccaaagccacctccacggccaccaccaccctcggtctgctgcctagcgggggcgtagtccaatcggatgctccttccggcaacgtcctgaccggtcagggcctcgagggcagacttggcctggtcgacgtcctcgaactcgacgtatccgaatcccttgggagcgccagtctccctgtcggtgatcagacggacggactggacgctaccgtactcgccgaaggtctcgtagatggtgttctcgtcggcctggaaggacaagtttccgacaaagagggtcttcgagggctcggaaggcttgtcgccaaacttgttggcacgctcctgcctggcaccctcggtaggggcgggtcgggccgaggcaaagttgacgttgatctctcgtccgtcaacctcctttccgttcatggcctcgacggccttggtggcgtcctcgacgttgacaaactcgacgtaaccgaatcctcgcgacttttgggtggttcggtcgaacatgaccctggccgacgagatctcaccgaactggtcaaactcggacttgagccagtcgttgtcgacgttccaagagagcttgccgacaaagacgttggcggaagcctcctgctcgccgtcagccgctcgggcgatggcaccggtctcggtcttggtcttcttggcagcgacctcctcgtcgtcgtcagccttacgcttgcctggaggtcagagtgggcgattgtcagtaaacggaaaaggcatcgcgtgcgacaggatgtgtgggactcaccgttggtgacggggacagcggcctccatcttctcggcctcggcctcctcggcatcgtcgtcctcgtcgctagactcctcatcgctggactcttcgtcggaagactcgtcgtcagactgatcacgcgagcgcagcgggaggtaaaatttgtcagtcgatgttaacgtgccttgtttgttccatcgacatcactcacgtcggcctccttggtagcagcggccttgacctgctcggtcttgctctcctcctcggaagaagactcctcgtcggaagattcctcagaagactcctagcgataagcgaagaaagatgatgatacgatcagtcactactctgtaaccgacactcgatgggcgacacgggctggtgactcaccttggcggcagcagcgggagcggcaacctcctcctcgtcggaagactcctcctcgctcgactcctcagactcgctggactcgacagggggaggggtgggggccttgacggccttcttgctcttgccagaggccttgcctcccttctataaatttccggaaaattttcattataacgcgcaaacatgaccggaacacgagatcgatccaaaaaaaagaagagaaagacatggcatcaatgatcgactcgtcgaagaaagcacgacgggatgccttcgactgacctttccgttaccgacggggtcctcggcgaccgaaggcttcttctccttcttctccttcttgtcgaccttgggggcggcgaccttggcagcggccttgtcggcagacttggatgatgatttggccattttaagtagttgtagttttgttttgttgtgttttggggggttttgtagagagggaaagagacggggtgagatgagaagaggatcgattgattaacgggttggtcgtatgtatgtataagtgccccctgtgtgtgtgtgtgagtgagtgagtactgtggccctggctgcagccgagtgtgttgctctctctctctctctctctctctctcctcccccggcgtcgcgaacttttcgattcgaatttgcgaagatcacgtgattttggaaaatcttactcacaaccagccaacccagccaggcgataacccgggactcggggtttctctcattagcttccgccggtggtcgacggtcgatcacccccccacacgactcttcccgatcgaactccggtggtgatcatggatgggatgacttgatattgatcgaaggtacctgacacgtttcgatcatcaccgtcaaaccgctcgttacaaccccttctttgcgcttgttgtcacagtcgatgccgatcctttcccctcggcctgcaacatcatcacgctcgacccgatcaacctcgcccaactccacatcaagcccaaactacaccaaacgctcgtcaccatcaagggaaggaattcccacttttccctcttgtctggactgatcaacagggggacgagtgaggtacccagttgcagtgcggggaaaaccgagagatagacgttctcgatgatgttgatcgacgtgttcaaggcggtcgctgggggtctactcgtaacatcctattcagcctattgcgctcgggtgaattcgtaacacttgcgatgtaatgacttacggcgacaccccaggtcgaaggctggaatacaccagacctagccaaatcaaactgtaacccagcttgacgggcgtctctgaatgagcaggagcaagggttttcatcgatcggatcagcgctaccatcttcatgccgaacgaccgcgtcaatcagactcacctgccgcatggaatagcaaagggaacaaggaatatatccccgcaatactggctaccagccaagctctaaagtgattccaatcctctgtcgccaacaagctgcacgatccatccgagtcgaatcagcgccctcgaggggtttacgtccgagacgaccgcccattctcacctgagcgggacgaggacgagcatgacggccttttcgtgcacatgccatccgaacatgaacgaggcgaacccgcactgcgcgatggaccgcaaaaaagtcttgtaagtcggtctctgccaaagttccgtcaagagcacctttgataagcaagtccgggtaagcctatcgactctcttccacgccgtcgtactcgaacgtggacctcaccgtttgggctagaccggtcaatatgaaacagcctagcggtttgatatccggcaagatggcgaaattggtatccccaaccagtccacgcgaggtggacgcgattccgctctgcgatacattcaagctgctcaggaagggcagccgggtagatactgggttggggccgagtataccagcatcagcgattggcttgtcggtttgtcaatcacatcgtatcaactggcatcactcacgtttgaggagtaaacgatcgaaaagcgctaccgttgcccatacgctagaacggacagttaagtcggctctcatcagtaggcggatttcattttcatcattcccgtgacgtgtagtccgggacccacttcggcgcccagtacgcatgcatcaagcccctcgtaaaaggaaacagcctcttgcccagctggtccagctgaccaagccagatgaagggccccagggctaaaccgaacgggactagcgtggatataccgatcgccgtgaggctagggattttcaaggtggggcctgcagtcgcggatgagtgaaaagaatccgacctctttcgatttagcaagactcactgccgggtgggaagcaataagctcggaacagatagacaaaccaggctggcgcttggtagacgtagatatgcctgtaatcggtagcagactgtcagcgtgttgtttctggcttccctgaggtccgatatgcccactcacttgaacatcagaagggtagcaaaagctccagcacagacggtcggtttcccctctttggctccaacgagactccagatcatcaacccaaacaagaacgcgttgtactgaaagtgaaccgagtcgaggatgaggaagccagggtggaaagcgatggataatccgatgatccgatcatatttccctgctcccgatgctcttgccaatctgccaacgtccgtcggatgattagtccacccgactctacggcggccaagttcgactcacctcagcgcgccgaatagcaagaccagctcgctgagcaggaccgttgtgcgcatgtataacacggtggcccatgtttctaccggtaagcgggaaagttgcaagatctcattggaggttcctttcttcaggatcaatctggccggaatagccaagagatacgagaaatatgcgaaaaaaggcgggtagtcgagagctgtaggcagtcgggcagaaagatggcttagctcgagccaaagttcgatgtccatgtgtccgacctactccactctgaggtagtctataaaattagaagtagaaaaggatattagaaactgggagctgatcggaagatcacattctactcacatcaaaataccaccgggacaatgggagattgctagtgatcgcaagccaatttcggtgtacctgccgtagtccagctgtgtcaatcgatctgtggaccaagagcttacaggtttgagctcacctcgaagtcggtactcctacttctagtccaatactctcgtcagggaaagcatctcgatccggaagaagctaacgatgacgtactaagcgggaaaaagcaggacctttacgacaacgacagcgacaaggagatctcgttcccctttgctcaggcccatcttgtatcctctttgcaaagtgaaacgacctttcagtgtacatccacttcagttacgggatggtcagatctctagcagctagccagctgtataaacggcactactggtctaaataatgtagtctccggatgaacatacgaaatagacgtttaccgacggtcaacgccgtctctgatgtcgaaactgcctcgtcatctgccaattttggcttcgaagcgaaaaagtcaacaaacgagggaatcgtgaagttccaagaacgacttcggcggtatgacaaccgcatcatctatacggccaagggaatatgcggagtatcctcccaatacgtgccagtcgtgggcgccaaccttcggtactaagcattcttgtcatttcgatcggatgtgaatatgcaacaagctacaaatcccagcaaggccacctacttcctgccgccgaacaaccctccgaaccaaccggaacccttcgacggggtctctagttgtctctcttctttttgttcctcatgctcgtccacgttgatttcgggagcaggggtactttctcgacctctgcttacaccggtccccggtatcaaccgggcggcagcagcaggaactgctctttccacaaccttttccaccgtttccacagggccacgaatagactcgggcagcttgtccacggcagcaccgatcatgctcggcgcgtcggcgacagaggaggatacttccttgccagcggcacgttcgagatcgtccatcggaagatcgacgtagttgaaggcaagatcgaagaagatcggcttcttgttcgtcgcagagaaccaagcccgcttgatgcccctgtcgaggacgtcaacttgggtttcggtccgggtgacatcacgcgatcgtagatgatagaagagatcctgatcgttggacaagtccccttccgcttgctttgcgtctccgatatattgctgggaccgggtgattagctggatggcagagggatagttgggttccggtagaaggacgtgaagttgcgcaagcttgagaagcctgtaaaggcgggaaataaaacagttctcagcctcgagagcctcgcggcaagctctgacccgccagaaacttacctgatcgaagtgccccaatcactcaacgccttgatcgagcgttcgagaccgtcccgctcgatcacaagtccaagctcttgcatctgtccgacactctgcagaatcgtgtcccaacatttgatgaccgcttgcaagttcctacaagcgtggtctcgcttgatcctgggtagaccccgctctttggtgccgaggacggacaatgacttgccgcccttgccgatcgcgtgcagattggggatgaccttcttgtccttggcctttttgcccttgccgcccgctgtggcggcagcgacagtgtcgacaacctcctcgacgcttggctgccacaatccacggatgaggatcatgtctcggcgggtcctccagctcaacaagaggtagacgatccactggtggacgaactcgatcgacccgatcgagctggaagatcctgctcctcgaatagggtcggacgagtcggttgaatccatcgcggcttgacgacgagagatcgactcggcttcgatcagactggccaagagacggtcgtacctcttcatgatgcctccgccgcggacgtcgttcctgccagcgggaacaccgttccactggaattcggtctcgacggaaggcgcctgttcgccggtcttgggtttcctggagaagctcttctggaggctgaggatatgttgctggaccttgagcagagcccggacgacttcagggctcttgaccttgacctccttgccttcccaagtgatcttgtgcagagtcttggacgactcgcccttgcccgagccaggctggacttgcttggcttcctccttaagatcggtcaataccttgacgagaccaggatagacctcctcgaggtcttcgtccttgaattcgtcggcaatctcttgcacctcgtccacgtcggccgaggcggcacgacgggtcctgcccagcttgtacgccgagaaccggacaacagctttcaatccgtcaatctcgagatcagccagagcctgttcgtgcgaggtctgagcattctccgacagcgtgtacaggacctttcgcctggtgaggaataagggcaaggcggaggagtactgcgcacgcgcgaacgcagaggtcgagaggatgtgcaagtggtaggtgtgaatctcggccaacgtcttctgatcgacaaacgaattcgacccttcggaaggagtggatttcttgtcagccaaatggtgagcgagatcgacaagctgttgtgaccatgaggaagctttcctcaagcgggagatttgctccctcttgtgccgcgacgagttttcggactgctgtaatgctagagcttgatgctcgttagcagtggccaggcaccgttcggcctcgaataaataaagttggagtatgctgtagataatgaagtataaaatgagctcagatccttgtcttgaacagcgccctggagatacataccggacatcgttgacggcgtcggccgaaacctcgacaggctttttgtatccaccttttgccccgccgtgggtcagacccgtggacttcctcagattatgaatcttggagctcaagtgtttcttgtaccggtcgtactccttgttcctcagaccgaaagcattgcgctccgaattcaagaggtggagaactacgggagaggccgtgtcagccttcgttcgcctttgagccggcaagctaaatgtatggactcacctgaaaaagaaagatccgacattgttcctcagaatagacgagcagcttgtattacccgtgctgaggtcagtctctctaatgcatcaggaggtaaagccgagatgatcataagacgacaatcacggtctgagtctgactggtccataggggtgccggccgctcgtggacagtcggacacggacatgaacaattagttgacatgtccgcttgttctagcgatcaggctcctgaacctgtgcggtacgcatcacccttcaaatgacatacggctggttcacaacctggttgctctggatgaacatgggttaccgttttcatatcactcgagaactgctttaaatttggtgggaattacctggcgttcaaactagaagaaaacttgccccgatcgattcacgcctgccacgaccttcccttctgcgatcgttgcatctcaaaactagtgaatattcatcaagccagtcgtaccgagaagggagtatatccgattccaagaggacccctccaggtactgctattgaacggcgtatagggaggagtatcagcttgggaattgggcggagaaacctattatcccaacaccatggcgtattacaagtcagtgcttgaggaattgaaccaatacgctccacttgccgtttctcacaatttacctacatcctccttcgtatatcctcacattggctatatgatctctctcaacattttctttcggttcgtgcattggtcatcatagtggtgcacaacatcagcaacaagcacaaacagcaccgcaacagcagcctttcaagggtcctacccctcccatcagcgacgatggcccgactcctcacgaattgcagctaacggattgtaagtcgctcaaatccatacacctccgatctagtatatctgactagacgctcgactttcattggaaatctagcgctgaaaactttcctcaaggttgagatgaatgcatacgagacggacaaggaatccagagtcaggtgcgtttcgccgatacacgccatctcgcagttccttcaccgtactgatcatatctcgacgcacttcatccatctttctatcggcagggagagcgttcttggatcgatccaactgatcgtcaaggatttcgtcaaggaagtgtatatgaggcagtgcgtggcgatcggaagtacagtttgataaagacgccactaaacccgaccttggcaattctgtgtgtcgaatcacttaggggagtttcggaggcacaagcagtagatgcaggaggaaagatctatactttcggttcttaccggtacgtcccggactgtatgcttctcgactacaaccgagctcatcgtcacatccttgccgcgattaacacagtcttggagttcacggtccaaactcggatatcgatacgctggtagtgtgtccaaaacgggtgacggtcgacgactttttcacggtgttttatgaaaagctgcagaaggatatctcggcgaccgaattgacggtaggtcccgctcactgggctccggtcttttccctttcgattgactgacggcctggcctgtatcactatgtaatgtagccggtaagagaagcgtttgtgcctatcatcaaggcggtcatcaagggagtcgacatcgatttcgctttcgccacggtcaatcgagaaaaagtgagccgcatcgaacaagcgtggttgaaaacgatcgaggatactaagttgtcattcgcaggtcccacgcgatttggatctgactgacgaccggatattggtcggagccgacgagaggaatgcgaggagtctgaacggtagtcgagtgacagactcgatgttgaacctggtacccgacgtcgagacgttccgagataccctaagggcaatcaaaatttgggctaaacgtgagcgccaaaatatcattccgacagactcgctagcaaactgaccgagtcattcctgtccccagaacgagcgatttattccaacattctcgggtttctgggaggtgtgcagtgggcattgttggtagccaggacatgtcagttatacccaagagcggccccagcggccttggtccagaggttattcgtcgtgttcaagcactggtaagttggaaggggtgatccgtttggacttcgaaattgacaaaaccttctgtaggcggtggccgcagccagtcatcctgaagaagctcgagggaagaacaggagtcgctgggacgctgaacctgaaagagtggaaccccgccatctatcccaccgacaaggcccacctgatgcccatcatcacgcctgcctatcccgtcatgtgcgcgacacacaacgtgtcatcgtcaacaatgagcgtgatgcagagcgaattcgatcggggtgccgagatttgcaggaggatcgaggacggtacggctgcatggaaagacctatttgcgccttcggaattctttgacaagtacaagtggtacctcgccatcatcgcttccaccgggacggaggaggctatgcatacttggtgagtttgcgatctgtggaattcgctaatcagcgattctgattgccgggccttcacacgtcgacaggtcgggaacggttgaatcgaaattgaggacgcttgtcgtcaatcttgagcagaacacgccgatcatccaagtcgcgcatccttggatcgaaggcaagtcagcggtgcatgtatgtcagggcgagttcgagatcaggcaagcagcagctggcaacggagcggagattccccgtcgaaccgagagcgaggagggggtcagcaaggtgtggacgacgacattctacatcggtttgggcctggtaaaaccgaagaaatgtgagttggggctttaatgatacgtaacttcccgatttgaacgaccgtgtcattgacgcttctacgtctacagcggagaacggcgagaagcaacagatggacatttcttatccgacgagcgcattcatccgagcggtcaaagcatgggatcagtatgatgaaccaagtatgggcatcaccatcaaaccggttaagcagtacgtctcgtgaggtgactgagttcagcacggtcgtctcatataacgcatttttcgaccgacagaaaccagctgccgagcgaattgcgaagtcacaaggccggccaaggtaccgccgagaaggagaaccggaaacggaaaggaggcaaggtatgcagactatttgcatcggccgctaactttgtccactgacgtcttgtcaaactcgcgtcatagcagggaacaagtacgcccgagggacgagctcaagatgggcagttgaggcagtttaagcggatgaggtacatcgcccccttttcagtaaggcgtttcgtcatctaagctaagaatctcttctcaggtcaaacaacgagcccggtttcggcctgatgggcgcccccgccgtctcaacagcaacgaacgggtccagcagcctcccgccgtcatcggttgcgggctccatgactccagaagctggtcatacagggcattcggcagacgtcaatgcgatggcgaccgagttgagtcaacaggagatggcttcgttcgcatccgcagcggcaggtgtcgccgaccatctgaacaacgagggcaagctcgtcttgccacatcagcaagagccccatcaggtcgggctcccggtcgcacagtagcgcgttcgtgatctgcaacctttcactacaaatcgggcgccctttcatcatggaatcattcggcgccttctttcagcattcctaggccagtcaacccagcagcccgtcacacctgactcttccgtaaatcatacgacttcttccgaaattcttccggtaaacctgcaccatctaacgaaatgtcccgagtcaaatgccaaaaaaatcgattcgtgtgcgagaagcgtctttcgtcctatgtatcagcccatatctagccatcgtcacagcatgatcataaacggcatctgtcatgtacactggcccgattcgacctggctcgtgagcaaagccacgaagccatctaggaaatctcttcatcgtcatcctcgtccgagtcgctgtccacgttgatctctgggatggcatcatcgtcgtcttccttcgcctctgcgatggtgacggtttcggtagttccttcggtatcgaccggtcgtgctgacaaatttttagaaatcgaactgaacggctccgtcatagccgcagccgcagcgtcggcattatcctttaccccgacctgtgtcggctgatgcgtatcggccgtaactttgacaggtggtaacacgactgtgacggtcgacgagtcggtcggaggtatcgaaaggggcacatccggtcgagagagagaagtaatgggttcggtagtggccgcattggctaggggagtagatgttccgaacacgctggtggccgtcgtcgaagccacggctcgcgccgactgagctggctggtcggacgacctggtgaccgagttggaatttcccgtagcggctcgcttaggtgctctcgaaaagtcttcatcttcttgaccgtcgatagtctcgaaagcgcccgagttgaggtcgacaaccgcctgttcggcttcttcagcggttcgcaatccgatctccttgcgaagggcttcttcctcctcggcatcgacggcatagtaggccagagtcgagacgggcggcagaggtctcgaaagcggaggtgcggtgggatgcagcaacattggcaagacactggaactagacattgtctattgacgtgcgcggaacatgtcagcggtgcacaaaacgacttcggcgatcgatagtacatacctcttgcgtgacgatcgacccgatccagccctgcctgactccgctcccctctatggtcatggcatcctcgaggctctgcgcgacaacctcggacagcctgagcgtgagaccaagatcttgttgggagacggccgacgcagtcttgcattccagcgtatgggcgatggacaggtggatcctcacagacagggcgagcaagtggggcgggatggaaggatggtggtgcaggaccttggtcactatcgatagccagagcgatgttcagcgagtggaccttgtcttttgtgaattctccgtaacgcgcagaccgactcacatcgcaaagcgctgagaacgacttctccctcgatcttggacaagccctttccgcttctcccctcgatgccggcaacgacgacttcttctcccgcgcccctcgccctctttttccccttctttcccacaacatcgttcaccgcgtctttgccctgcgagcttgccagcacgggggtcttggtatccaggaccaaggaagccgatccgagggcctgcttcatcaacctcgaatggaagctcgatgaagacggatccagttgaaggttgctcaagaggagggcgtggaatttgaacagcgcgatcctcgtcgagctgaatcacaaatgccaaaggcaaatcagagtggatccggatcatgacgagactttcgacttactgatcagctttcggcagggtttcgagcaaaaagacgctcttgtccaagatcagccctacgttcgggagaacatgatcgcccgccctgcagatacatcaaacaacgtcagcctcgtgcccacgtcccggttcaggcttcagaagaggttcatgttggtgaatgggcagactcacgcgatgacgacgcctcccaatagtttcataccacaagcccaaatcttgttcttgagccggatcgccagagccctcgtctcagtgtccagcgtctcctcggtctgcacagcgacgtagcgagcggaaccaacattgtcaacgtcggaatcatcaagcgaaaaagaaggatgacccgagtgagactcacgagggtctctggggtgagcgaaagacatttcaaaccgagtgcgatcaagctacccagcgctaacccaacaggccgggccgtctcgaatctacgaacaaaccaggttaatgttgcacgacgatcagtttccttttctcttccctcggagtttttgtccgggggagcgcgaaagggtaaggggcggatcgggactcaccggagtaggttcaagatccctgagatccagccatccaagcacctcatgagccctttcgaacgggattccaatgtcctcgagaggtcacccagagtccctgacgatccgtccccggggatgaccggctggacggccgtgatcgcccactctccctttttcgcccccgtctgttgagcttgcgcttgaccgtgtgaaaccttgccgacggtgaaccgatcgtgatagagcgcgtgaaagaggacggtgacgatcccctcggattccctgatcatgccgttcatatcccccctgaacgtgttaccggcagcgacttttcccgagagggtatgtaacctggccaatagtctcgctgcgaggtctctttgctgcttgtcgacgccgccactgccactgccaatggatggaggggagaggaggagggaatgcagtaaagggagaagggtcgggagcaggggtcgatgcggggtcgggttctgagcgatcaagtggggtagggcgatcagacaggcgaggatgatcctcggatcccgggacccgctctcgacgctttggccctgaccctgaccctgagcttgagattgaggagccacggcgcgcttgagggtagagacgatggactgggacgtcttgagcaggttcggggtagacgtcgctcggtgataagtcggggagagcgaggcgtgcgtgtggagtagtgtcaacagaggtagaaggtgagggatggatgtgggtggaatggcgttgttctaccgggtcgaggttggaagttcgagtggacgagaatgttagctccctaatcttaccgtaggcgtagtcagtaagagactcacgttgaaacatccgagcaagttcaacaaccacgtctttccccatcctccacccaagacgtaaccctcgatatccatctcgaggacgagcctagccaccttccatgcgtcctgcctctttgtccattcgaccctgcccgcagacgatcccgcggtgactcctccgactgatgacgacgataaactgttggtcgaagatttgccattgcccggggtgatagttacacaaacggaagatccgagcttgttcaagaacttgtggacctccgaggtggctaggtgggaagggcgcgtaaaagtcgattgcgatcggaggagcggcacgagggaaggatctgacggcaacaaagccgtgagtagtgagaggtccgacatggtcgccgtggtgtttgacagtgccggggttgacgtaaggactgtcgatggaattggtcgttggtagcaatcgaggtcaagagttatagagcattgggactttgtggtagaagttgaataaaccgaaagtggaggttaaagttggaacggacatcggtgttgcggacacggacatcagaaatagcacggaccactagcggacatcaaaaacagtttgtgtcataagcggacatcgtgaatggcttacttggaccggggtaagggtcaccctactcatacatcatcatcatcatccatgtcagaccagatcgaacctgcaggtcgagctgcctaccgtgatcgtaacgacaagccatcatgtcgactcctggacaagtgatacctgctgcggggggtgtggcagccgcagtcccgcccccacccaatgttcagaggagacggcccaacgaatccggagggctctttcaaggaaagaagaagaacaagtatgctcaaccgagggtggccagcgggagcgtcggggcaggtggtccaggagcaacagcgaacagtgaaaccacgcaagccgcatcccaacagtctagtacgagtgatgcgggagtagccagctcttctgcccgaccgaccaatcctgcgctgagtaacccgcctcagcgtgcagtgacccctatccccagccgactcgtcccgggcggatcgggcagcagtcgacctaccccgggaacgccttcgcaatcggtcggtcgatcgggatcgacccaagggtctccccgtacctcggggacgaccaacgctacgagctcgacggatccggctccggctccggctcgtcagacctatcaagacttccccatctacctcctccctcgtgtcgcctcgaccaacccaacggccagcacagaccctctgttacgtgcgctccccttccctacctctctcaatgtcatccatatccgtcatcccggtagcgccaccctcccccttcccgacctttccgcaccggccggccagctctacctgaatcgtaaagaccggatgtggtgagttgcagatcgattcgaatgtaataccggattgtactgacgacgcgttcgtgtttgcaggaggcggaggtggtggtggctgtggcggtggtgggggttgttgatatcgtctttcaacacaagacgggtcggatcgataaagccgtgcacgtgaccgaagcgctttacttttgtcgagttataattcaaagggccggctttaccatgttctcgaaacagtgttgtatatctatctgtctgtatcgacggcgttaatgtgtgtaccaccagtaacctatatatcgcgatcaataatatgctgtcgtggactgtgatcagacacctcgagcgatgtgactgatgaagttacagccggacaattgtcgattctggtgatctctgccgaaggtgtgtatcactggtaagtttcattcggcctcaaaacgaacaccgcccaagtcttcgtggagaacggatagacacacgtcctcgaatcgagttgaacatgttccgcgcaagggcgttgacgactaattacaagacatttctctgaacattccaatcatccgttaccatcccgtcgcgcgtctagaaagagtagatctctcgtccgaactgggcctgaatacagtaaccattgctgtcagtcatcgcatcacgagtcaacccaacgaggcggggagggtcgacttacgggctgagcgggcttgttgtccaacaccttttcgatcttctccatgacctcgggagtgagcttggggaggaccttgagggccttgcagttgtcggcgacctgctcgggcttggaagctccgaggatacaagtcgagacgttctcgttctgtgagatcacgtgaggggttttgctattagcatggggacgatcgttgctctccgtcaggcactcaccttgatggcccaggcgagcgccaagtgggtcatggtgcagtccaactccttttccgcgatatccgtcaacttgcggatcttttcaatcttggcttgggtctcggggctcttgagcttttcgacagtgtccttgaagaactcggggttggtggcgtatcgagagtccttggggacctcgcccgagttgtactttccggtcaactggaaacgtcgtcgacccaacgtcagccggggccggccagaccgtcacagcagttccaagggtagactcacgaaaccggaagcgaggggcgaccagatggtcgttcccaatcccttgtgtccgtcgaacaagggcttgtactcgacctcgaacttttccctgtgcaacatcgaatactggggttgttcgcaagtaggtccgatcaggttgagcttgtcggcgatagcatgagcttcctggatctgctgggcggtccactcggaggtactgcacaggcgtcgtcggaatcagcacacgagtgccgcggggtcgcgaacatggaaccaagactcacccccagtaaaaggccttgccagagttgacgaggtagtcgaacgccctgacggtctcctccatggggacggtagtatcaggtcggtgagcaaagacaatgtcgactatcgtcatacccaccctgtatcagctgacgccgccccatattcgacggatgacgacatccccgaacttaccatactccaaacccaacctcttcaaactgtatcccaacccctcgatcaaatgcttcctgctcaaacccctcgagttcaactctttacgtcccgttccgaaaaagatcttggtactgatgatgtagtcggatcgttgccagcccatctcgtggaggacacgacccatctcgacctcggagtttccttcggcgtatcctctgcgcggggtcgtaaacggtattcgtggtaagcgtttcgatcgggatgattgtacagggcaaaagggacgtactcggcagtgtcgaagaagtctgtgaaatcacgtcaaatcacgttgtcgaatcagctcatctagcacgaattgcctcaaaaggaagatgcccggcgatgggcttggaagaggtgatgatactgactgataccgttgtcccaagcggtggtcatgatgtccttgacgacgtctcccttctgagtacctccgagagtgagccatcctcccctagacgccgcccgagtgtcaaaaaggtcagatcggccgaaaaacatcttgcagtgagacgctatgcagcgacattgacgtacatggagaagctgtattaacggcggccacgatgcgctgatcagcatgggggcggttacaggtcgaattgggcgacgattgagacttacacagggacacggagaccggtctttccaaagttcctgaaaaccatgccggttccctcggggttgctatcaccatccacatcgagaatacgtcagcaagaatcacgacaacgatcaagccaacgacgacgtacaacatcttgtccttctggattccgagctcggcggcgttggcgttggcagacattttgactaaattacgtagagtgcgtgtggaaaacagtttgaaggggtatagtgcgaatcgcaagttgtagagggtcgaagtggacaagatgggaaaagtcgacagggtgctgatggaaagtacagcgatgcatctatatagttctatagctcgctcgatttctcgcttgcaatcgtgtcgatgaccgaaaccggctccacgcgccaccacttgccactttcccgttgacccctatcgacctccactttcgacgaccccacaaccacgccactcacgtgacgatacgtaattcatttcatcttcatcgaggcggcagagtctgagcccgggggaaactcggcaaagatgggtgggggggcggtggcttcatttctcagaataaccaccgatccacttcgccggcgggattttcatttcgagacacggaatccaaccttgcactactctattgcacctgtgatggattcgtttggacggggtcgataattggtaagcagacttcggtcggtcggactcgatcggtgacactatcattctcaacgaacgggcgatagggaatcggatcttttcacttgatgctccatgtcgatcgccgatataccaactgcagcactgagactgcagggacagcatcatcgcgcatcgccgaagctcctccagcggattcatcgccgtcgatacttcatcctatgtatttgtccgtcctgagaccgaatcctgttctcgtcatctagcgtctagatcgcaattgttgctacgaaacatcgtaaactccacattcctgacaattgtcagcgaatcgcgacaaacagccaggagtatcggttgaataccatctcgttcataaccgtcaataccagcctacatgcaaacgctcgccatcgacagctcaagtttatggcccgatgcctgtgtgcgctgtagcgaagaccgtcgggtttcgtactcgacggatatccgagtactttcggttagcataacgatatagcctggttcaaagagcggcagagatgggcctcaacttccaataaaagcgtgtggagacagaagagagccagaagtggtccggcatcatccgtctgcccacttcttcgcagaccttccatcattcagaccaccgccctgattcggtctttgctgagatccttcactgtcggccacctcacgatgtgacctcccactcgagtgacgactctccccatcgatagaaaatgcaaccgagaggtcacgctccccaaagaggcagcccggctcgtgttggtctcttacatgtccgtggtggtcgatcgcatgtgatcattttttgttcctcccgccgagcctaaacacgggttctcgaaatattcataggtggctcatggtgtaatcgactggcaaagttgaacgaaacatgtgatgccagacctaacgaaacttgtgataccgaacctgtagttatcgccgcctgatagacgcaaccttgacttttacctggaaggagcttagatccatgccggtagccaagaggtctgctgcagaatgcaagataaaggcagaagggaagaaggtcacacgaagttatgaccagatattttactacgccgaccgcaagggcagatagaggctgtcatgatacctagagagttttatctggaccatgatctatcatctcgaaacatgcaatacaaagccaaacgcacaccgagtgcgtcggggacaaacaagaaaaggcggaattcccaacatcaccgacgtctaaaacaacaactcgaacggattttccccgctcagcccctaccggacggtcattccctgaccgttcatctcattcaaccctgatcgtcttccgccctacacacttcaatcgaacgagccgattaagcaaagtagaccctccaggcgaggtaagcgaagaatagtgagagggggatcatgtaggtaacgctacgaggtgatcacacccggatatcagctcggttcaccgccatacctgatgatggacaaccgtagggactcacagtccgggacccgagctcgatccggtcgaaggaatacctgtagagttgacagcgaccttcttgctcttcttctacagaatcccaggttagatgacaccgatcagcttccgtcactctcgctagccgtatcccaacttgggagcaggactcacctcgccggaaaagtctccgatgtacagaggtgcgagctgagctcgagcctcgtcactgtggccgacatcctcaaaggcctcggtcgcgtccttgccggcttcctcgacgaggacttcgtcaccacctgggtgctgtcgaggcggggaaaagaaattggaattagctcaagttctgtcgacgtggaagctaaacactgaagtggagtgatgcagtatggtgaattattgacaagcagggattggcagggagctttgtttctagatgccgctcaggcaggatctcaagtcctcgcgagctgtgatgccgggctgccctcctgagtgctccgacacatgggacccgatatgacagagacaaagctgcacactaacctcgtcaaggaagggagtgatgtcgtaaactaaaacggacgataagaacgatcgcacgatcagctccggtcgaacacgtgaacagtcagtcacaaggcgcatgccggactcacccttgtcgtgcaacagcatgtacatcttttcccgggtaccattctcctgcagatccttcaaagtgtaggtcttgggtcccgaggaagccgatgcgggtgcctgctcagtagacatttttttttcgacttgggtgtcttgttgttgttgaggtcgttgaggggggtcgcgaacgatagggagcgtgtgttctatacggcccaaatgaaactatcaaatgcaggaatcctcgagggggtgttttgtggggtaggcgaagatgctaaggcttgtggtgctgacctggataatgttggatataaggtcgattcgattggggaggcgagagtgccatgccccgctcgctcggcatatcgtgtttgtctgattgattggagcagagactcgtcgtcaaccagccagcacaaaccaggtcgttgccgggatgggtgggacgggacgacttctggacagacaaccttggcttggaaattgcaaacaaccgtagttccggtgcgcaaccgcacattaggtgttttattttgtaccacagtgttcaccgtgtgagatgggggattacggttaaggaaccggcttctttgactagcgaccggcgccaatggtaaataagcaagtctttcgacggaaacatcaacgacaaggtctctctgccagctacttatggagtaaccaattgtcaggagatcagacctcgagttcgaaatactctagagcgtcattgtgactgttctcgttgtgagaacgagtaggatggatgatcatgatcctctgatacgagtatgctgctcgcaaggtccttttcaaaatcggcttgatccggagggcataacatagcccttctctctgcttgacactcggtagagtgtctccccacaatcggtctagaatggatgtccctcggtgtgtatgcaaggtttgccgctctttcagtagcgataagtcggcgaaatgacttcacgccataagggatcagtaaccggatagggctctccggtaccgctcgagtcttactttatgcctggtacatcgaacgttgccccttgcgacacagtgtacatgtcatctgaccaaacgcgcatatgaaaggaatacacctcatggtcacgcggcccagtcacgctatagcttataacgtcgccttgtcagatctattccttttctagctcatctgacatgttcagcagggtcatcgttccggtgagctcgatggttttcttttcgcagcagcgcggttcggggcgaattccgtgacttatagaccgtgcatggcgaacgaacggactgtgggaccgggctgctaaacaactgttgtgtatctcgtgctgaaatccgtttatcactgcattaccattgcctcaccaaggcaaagtatggcaaagtatggcaaactgcaaatccatatcgaaagcgatgtgtcagaatgattgaggtgaacatatacccgaaatgtcactgaagctaccccgtcgtcaaagatgatacaccatcgcacgtgatttttgagacacctttgtcatatagttacacccgtccattctgcgaggttccctttaaacctcccgcactatccaccgtcagctgcgacatgaacgtcgcccattcttcggtgaatgacgaagccttggccttcccgctgtctccagaataattggtgccaacaagctcctggttggcattcacacacgctcttctgacacgagacatcttgtgaagtgaatgctaaagactacctgaaaagattgtcgcattgtttgggtgttcgattgatccagctattgagctaatgaaagcgttaccggccagcgtgatggacgactcgttggttcggagctcttcagcacgccccgtccttatatgtcatcggatcttccagagtgatttagaacgcgcgtcacacgctgcgcattcccctttcaaaagctgaaaggaacgccctgtacgcaatgataaggagacgcgggacacggttgaacgaagtgataatagtatgttggcatcttctgtcatgttgcatgccctaccatgtgggagcgctggacacggttggggttctataccgacagacggttccaggcgttattggtatcatattccttcacgaggcaagtcggttgggcatcatcgccaggccatgaattatgtcatcaattttatttttcactgccaaaatcgcagatgctgttttactatccaaccaatgtcatccgtggtctatcatctcaatatccgactcttaggagggaagggattcgaaagctcttgctatcagagaacgtacttcatctacgctcaaaccgtccaccggcaggactgctctggcgagatgttcgcgtttagtagcaatcctctggaggtcctcgaggttgtccatcttgaacgtaaaaatcaagctgagtgttttctctgggtgatccgtatgcaatctcacggccgccgagtcgagcccggcaagatgtgctggctcgcgacaatcgcaattgttccacaccaggagtcttaaatggtagttgagctgacctgtggtgtcttttggagagactatatagacaaaataatgtgaagtgccgaatatgaaaccttgcaatcgcgttgacaacagctcaattggctgcaagttctgacagtgcagctcatttataccatccgcgcggctcagtcgggtatgtcgatatctcacaaggcccgcgccaggctgatctgggacagatggtttggtagtggtgctgctttgtttgtcgctggattcgcgggattgtctggctgacagcacaacggcaccatcgggcgcatgtcgttgggttgaactttggctttcgtcgatcgtgatgggcgaaaggctcgttccatttgaaagaggctgtagtgacgagattgagctgtctacagtattccgttgactagaccgggccaatgccgaattatcagctgaagttgttgcggagtccccatcgttgtagaatacagatgagtgagagtcagagcgaagtttatctttcaaccttttgaggccacttctcgttctaatgaccatctgcattcctgtggatgccgcagatgtagcaaaatgttgaaagtaggcacagcaacaagaaggaatttttacgatgatattgtgcacgacgagatatcgagttcacttctcattctatatgtagcatgctgtgtataaatgttgcgacatcaagcagcaagtacgacggacaaaggatactcaattggattgatcacgcagagaatgacgaatctcacgccgtatatgttgattgcgaccgtaccgtctcgtgatgcactcagttcggcgtctaagtgcgggtttgcccctgcagacaacgactgttcaatcatacaagaaccatggacacgtcttgacatccatgcatcaagtgcagcagcgagatatgttacggattcagaccgacttgccttggaatccgagagtactcgggcaatcgcgaaccaagagatcgtacctcttcgagcatcgttcttcgtgatgtcgcgatccctactcgatcgggtctaacaaaggaggcgctacttgctagtagcaagtgatatttgtgaagtgatagctggtcatctgatctccgcatgtccgacttgactgacggtattatctgagtcgcacggcacatggcgcgagtgggaaggaggctacacaaaagaaaagaataggctatcaagcacgaattagccatcatttgccttggcctgggatgccgcggcatcaggcataagcaggagggattgctgatgattgggtgtcgtatcgccacatgtctaacaagcactaccgtacaaggtctctcattccatagcttgacgatcgtacccgtaaagtgggcaaatctacttgacatcttcgtgcagacgatctttcacgcctcgtatactgtcacagatcacctgtttgtgtttcggctcgatttgctgcgtaatctcgacgcctttgtggagggttcgaagcgttggtttttcgatcgtgtagattttttcccagtcggaaaggatgtcctggttctccccggtcgtgtcggtccattcttggtaggccccgatccagagttggctagcagggttcggacggtagaagaagcacggtggggtaagatctcgtctcccgtccaataggtctttagcggaggaggtttactcggcccggctttagaggtccccttggactcggtataggaatcttgtgataaatacagggtgcgctgactccaagtcgaatcggattcgtccgggaagaagctcgggtcggtcgtaaattgcaccttgtttgcgaggcttgaactcgggacgagacgatgccgatgtatagcctgtgtgagcctttgatcgattcgttgactctgtcgagctgtctgtgagtctgtgatctgtgatccgggacgactgagttgtgactctccgtcgatcctacaataaattacagcaagtactataatgtatgaggcgtcgagaagcatccaacgccaccgagtgatgccagagacacaaggtgaaaagcctcctttctctcctaactctctcgtctgttcactgcataattacgtaactgcttcggactacttgacgctttctcacgcgtttcccctcctcctccgcctggccccttctgtttcctcttgtttccagttttttcattttcgcgcgccatgccttgtgctcgctcacccgccactcccccccctcttcctcctccccattcaaccacatcttgatatcgacatcctcgataagctcaacccatccaccacccacccactaccctcctcttcttcttcaatcaagagttagactctagacaaaacttacccaccttcccctcaacactaccaaaaaaaccgcgacagagatttctcttgttccgacaaaactaggatcacgagagacctctatcaacaagaaaaagaaataactgcaatcatggctgagtgagtcgatgtgacggtcattgcgaggtcttgcagttggacaagaaagagagcgcagacagatttggggagaagtgcagtagaggcaacacttggatcaacgatatggcgggatggaagagcacagacacgaacgcacgtaatcgataatcgaggtgacctgtatcgccttgcccaaggtggcgggcccgctcgatatctcgatgtgcgacgatattcgctacaatctctcgatctcaagaagatcagtctatcgctcttgtccgctctgctgctctcgctcccattcttgaagcgctctcgcaagacctccccgactacctcatgtcccacgaacaaacgagcttacgataccttccttccttccttcctttctcttttctcgcttctactcgaatccactccatcgacggacgacccactcgtagcactaccaaggaagtaccccccgccaccaccggctctggtgagacctccgggttgaacatcgatgaggccctcatcgagtccaactgggacaccgtcaccgacaagtaagtccacgaccagagtcgggatccgaatcgaccgacgactatcggataccgagctgagctgacctgacgctcctccccccctgcgcgcctgatgacagcttcgacaacatggagttgaagcccgagctcctccgaggtatctacgcctacggtttcgagcgcccctccgccatccaggagcgtgctatcatgcccatcatcaccggacgtgatgtcatcgcccaggcccagtcgggtaccggaaagactgccactttcaccatctcgatcttgcagagggtgagtcggcggccgtcagcgtcagaagcgatgtgggggacaggacgctgatgccagtgtacggatgatgtttcgacgcaccttttcagatcgacatggccctccgtgagccccaggcgttgatcttggctcccacccgagagctcgcccagcagatccaaaaggtcgtcatcgccctcggtgactacatgaacgtcgactgccacgcctgtgtcggtggaacttcgatcaaggaggacattgccaagttgcaggccggtccccacatcatcgtcggtacccccggtcgtgtctttgacagtgagtccgccacggcaggtggcaagcaggatgagggtatccgatgagcatcagttgacgacgtcgcccgcagtgatcaaccgtcgattcttgaagaccgaccacatcaaggtctttgccctcgacgaggccgacgagatgctctccaagggtttcgccgagaacatgtacgacatcttccagctcttgcccgccgagacccaggtcgtcttgttgtccgccaccatgcccaacgacgtcctcgaggtcaccaagaagtttatgagggaccccatcaggatcttggtcaagaaggaggagttgaccttggaaggtatcaggcagttctacattgccgtcgaaaaggaggactggaagctcgacaccttgtgtgacttgtacgagaccgtcaccatcacccaagccgtcatcttctgctcgaccaggagaaaggtcgactggttgaccgagaagctccactcgagggagtttaccgtttccgccatgcgtacgtcatcgcgctgagcagagcgtcaatcaaaagcgagccgtcgatgcagatcactcacgctcgtgttcgcgttctttattcaacagacggagacatggaccagggtgcccgagaggtcatcatgaaggagttccgatccggttcttcccgagtcctcatcgccaccgacctcttggcccgtggtatcgacgtccagcaggtctcgttggtcatcaactatgacttgcccaccagcaaggagaactacgtccaccgaatcggtcgaggtggtcgattcggccgaaaggggtgagtcgacgcgtgtctttatcgtcgagagcggatatgagggaggcaagtgctgattcgacatcgttgtatcgtgctcgatagtgtcgccatcaactttgtcaccaccgaggacgtcaagatgttgagggagattgagcagttctacaacaccgagatcagcgagatggtgagtcggctcgtcatcctgcattgtcggctcgattcgatggaacctcgttcgctaaccgttttcccgtacctcttcgctcagcccctcaacgttgccgacctcatctaagccggtcgatggactccctttccccaacccaaaagtttcgcccctcccccttttccttcctcattttgcctacaccttgttccttgttcgctcagggacatctctttaccgacctgttctcctccccccaatcctccccttttaccccctcgcttagttgtttgggatgtatgactatgatagattgacacgcattctcattctattcgctcgatgaaaggacggacgtgttgcagttgggttctcgtcgtaaatcgtgatatcaggaagcaaccattaggtacagtcacgctatgcgctcattaaaagaggagggggagccgagtaccgggttatacagcaagaaaaaaaggaaagccactcgagactggattcttacaacaaacgatccaccgtcgaggcgccaggagacatgagaccctcgggcctggtcatctcgccgctctgcctgttcttgatcgctctcttgcgcagatccaattgcgatgtcggtcggaaggcgccctccgagagacccgagactcgaggcatagctcgctctcgtggcgctggacttcccgctgcgacgcccgtcaaaatcggtcgagcggacgaggcctgcttgaggaacggactgggaacgtcgtcgtcggataaactccacttggctggcgtagcattttctttgtaggtgaaatcagcagcgggaagaggaatcttggaaccttttccgaacgagttccgtggtgctgcaatggtggtgttggcgtggttgagtccgggtctaccgatcttgggccgggcggcaaaatcggtcggcttgccctcggctcgggcgaaaagcaggtcgatgtcattgcaatccggtcgtgccgcctctgccaacgactggttcagcttggccgagttggtggtctgcagtttgtccaggtcgaatcccggctcggccgaaaagtcgtgcggatgagatcgcgatcggatctggccgatgggcgtgccaaagtccatcatgatgacgctattctctccaccaggtatcggtgatggaggcccagactcggcgtcaaacttggctcgtccccgcaagtcgttgaacgatttcgtggccaagcgtcctgcagatcggaggggcgtgccgttccgtgcgacggcgtctgacctcggactggcgcgagggataccacttctcaacgatggactcgccgaagcgaaatggcctcgggcgggcgagtcgagatccataaagtctatcgatgggttgttcaagggcgaagacttgcgaggcttgctcgtgatcagaccgacaccgacgttgggcacagtactgtacacgttcggtatgaatcagactgaatgctacagctgagcgtcatcgcggaactcacgctcgttcctgcaacggcggccgagattcggtttgtgccggcactgtcacacctatcaatatgttcaggtcagtgattggtacgattcggactcgtgcccgcgtcgactcattagccatcgacttgcttttctcgttcagcttgacgtccgaaccgctcgctaccgccttttctaaattccacctcgccatggccgtctcgaggttggcccgaccgacttcaagttcccgccgactccagatgagctccctctctctgctcgtcagatccttttcccgtgcttccagctcggcctcccgcgctcgtaccctcgacagctcatcttgcagttctttcgattgcttttcaaactcggcgtccagctgagccttgtatttgctcatccgatcctgttcctgtctccagacggtttcgagctgatctcgttgcgcagccacttcttgttcccgtgactctgcggattgcatacgctcggtgcatgccttttctcttgcagtgaccgtatccctgagggcgataatcgcgtcgagcctgttcggacacgcaccatgttagccttggactgtctcctgtgtgagaccacacccagacgtacttttctccgagatcggcggccatcttgtcgtggtcggccttggcgcgacgtcggtcatattccttcttccacatcttcatatccgctgaactttgcaattccttggtggaaggccgtcttgccggctacaaacggtcgtaggccgtcagtccgattgtagatcgcttcgacacaggtgagagggctctcacatcgattgataacatcctggtgaccaagtctctcaacccagaactgtacgccggaccgatcggggtccatttcgaatgcatcaccttggtcaacaattcagattgtgatttggctgaagcaaagggcgatctgttgcgacgtcaacgtcaattcgctatcctatgattcggtccaggacgggacgacaagtagacttacgacaaggtacagagttcgtataccaaacaccccaagctccagatatcactcttgtgatcatacttgctctccttcaagatctctggcggcatgtaaagtggagtctaaaccatgtcccccatgagcgcctggtaatcaagtcagctggtaggaagaaatgacctactccgacatatgtctgtgtgaaagcacccgcggccaagttcttgctcagaccgaaatctccgagtttgatgttatcctgttcgtccagaaagactgtaggcgggaagcacatagggttagtctatcagctactttcgtccctccaactcgcccgcgatcgttccaggtagacgatagagccaaaagaccatctgagagaaacatcccgcactcactgttctcgggtttcaaatccctatgcaaaacctgcccggtcgccttgacgtccctcctcctcgccgcaccgcccaaccctaaccctaacggatctccgggaccaggattgatccccaacgattccaacttgcgtctcatccccatctcccttccgggcacgacgctggatttcctctctcccgcgccaaacccgcaggaagatgacgacgatgatggtccattcaccgtctctggggaagtcgaacccgagcccgaggcagagtgccgatcttcaggataatgacagtgatgcaatgcctgggtgagttggataaaatagctccataccaggctctcggggatggtcttgccgcgatgacggaacgagtcgagtactctgcctaggtccccgcctccgcagtactgtgacgcgattggaaggtcggcgtttggcaatgtcagacgacctcacggaggaagacactacaaggtggaggaggatgaaacaggaggaagctcacctccatgatgatgtaacatttgagctgttgcatgtccataatcttgtcgataagctggacgacgtgtttgctcctcaatgatcccaagatccgcctgtatcgtgtagaaccagcgtatatgcagccgagatggtcgtacaacaagtcagtttggtccgattcggatgtcatgctggggaatgaaacaagaccagagaggaaggtaagggaagaaaggtactcacacttcttccaccatctgacgacgatctttcggggaaagcttggaatagtctagctgtttcatcgcagcaatctatcccggcgaagaaattccaaggtagcctagtcagcatctcgttgccagactgtcatcatcgttatcgtagccaagactagagggtgttgggcggtccaaaggacctagaagccgactgggacgaggaaccagccccttcccggcctgacccgtccgactcacatgtccatccgattttctctccaccttatggatcaccccgaaactcccctgtccgatacagttcaataccgtccaatcctccaagttggagatcggcgaatagtcttccaggtggatggaggatcgacgggtggtcgtcgtcgtcgtggtcgttgttgttgttgttgatggccccggtttggggtaaggcatgcctgggcgattcatcgttggcgtgcagggaatgtttggtaagtcgctggtgtactatagctatgtgttcatggtctgtctatacccagtctaatagtcaatggtagatcgaggggtgaacaagttgatgatgggctggtcgaccacttcttgatgatgggatgggatgagatgaggaggttgatcgtgtttctacgcttctttcgacgcaaacaagaactcgaaattaggttgaccaagagtccgaggtcagaaagaattacataatattagcataacatcacgcaaatcataccggcatcatgtcgtaagcagaccaaactacatctctagcaattacgggctcgattcatacggtcaggccgatcatgcacacctgtcgagtagttagtaaattggtagaagggctactaaggcgacgaagccaattggacgtcatctcgcgcatgccttgattcaacgtccagagcgcggctcatgacaatccgctcgcgggcaactaggtcggcgcgactcggacctgacgtctttgacaaccagcgactcgtctaaagcatctttatctcgccggcaatctgacctgcctaattgtcatgggtcatgcaacaaattcgaaccctgccacactagctctgataattaccggtgtcgttgatcatcccggttgagctctgtacctgaccacctgtagtagtagttgcctgatgacgagagtagagtagatcagatgctagcggaagcaaatttgattacggatcacaaagtcaccaccaccaaagccgcccgctccgtaaagaggaaacacttggttggaaacctcgatcgatcgtcaccactcaccactcgccagacaacgacgatacagctcgcagctggacatacatctatatcggtctctcaggatgagcacacctacgtacccttctaccatgctcgggacgtatacccccaccccgcttagaaaagtacattatggccccaacacgctggccgaccaactcttgccctccatccggtacctcctcgcacaagcacaggggggagatgtcgatgaaaggaccgtcacggggaaagtaatgatcgtcacggggaggagcttgatggaaaagaccccggtgatcaaggacgtggaaaaggtcttgaagaagaatgggttttacgggttgaccttttcggatattgcccaacatgcccgtatgtcaatgtccattccacacgcacctcctagcatatcgctcatctcatacctatgcacccattcgaatcgctttcgactgcaattgcgctgtgacagcgatcaaggacattcaacgagccaaacaactcgccctggataacgagatcgatctcctcctatccatcggcggtggctctcccatcgatagtacgaaagccatctcccatttcgtacgcgaggccaaggggggcaagaggcctttcttgccccatatcgccgtgcccacgaccttgtccgtcgccgagaccacccagtgagtccgggtttcccgattggcggcaaaggctatgttgggaacccggagcttacgtgtgcacacctcatgatacccgtaggaacgccgggtatacttcagaagagggcaaaaaagtcggagtgaacaacccggctcttcccccggcgatcatcatctatgaccctatcatcacccaatacactcccttgcacctcttgatctcgacaggggtgagagcgctggatcacgccgtggaaacgctttatcggccgaaagtacccaaggcagtcaaggatatggcattgtggagtatcaacgggttgatgatgaacctggagcggtgtaacgatttggcgggcaagcggggcgagggggaaaagttgggagaggacgagattgcagtgaggacgaggttgatggtggatgcttgggaagcgtaagcaacgccccgaggccaggcagtgtcgccgagtcccgattcgatcggctgacgttcgcgccattcgggtgataggctatggccgttgtcgagtgtgggcgctttgggtctttcgcacgctctcggtgagtcgctacagaccgggcgtgtgaccgaggctgaggtgatctcgctgacaactatcacctaggacacgccttgggagcgacctactcggtaccccatgggatgtgctcgtgtctcaccctcgggacgtcggtgcgacacctctcggccaagttgtccggggacaatctcgactacctggccatggccatcgcctttgtgcctaccaaattcttgccttcctccagcgccggcaagaaatacacgatcgaagacgtgcaggccatgtccatcgacgaaaaacgcgaggtcgccaagatggtcggcgagtcgatcgaggtgttcttgaaagccgtcgacctggagaccaagttgagcgactgggacgtaccccaaaaagacctcgggccgatcggtgacaagatcgtcgagagcctggggagttacgatatgagcaaggaagaattcggtcgggtcgttcgcgaggtcttgagcgaaatgtcgagcgacatgcagcagcagaccgacccttcgcaatcacccttggccaaacaacgtaccccgcagcatacttaccagcacgggactgatgaggaaaaggataggttcccattgggaacccgggcgagtcagttggctctcattcaggctcatcacgtggccgagctcttggacgctcaacatccaggcgccgggtactcgttccccgtcacccccatgtctgtcgctggggatcgtaacaagaaagacccgctgtacctcttgaccaaccaacaggcgggtacgggttccagtcaagtcttgcatcaagaagcgggggccaagacgcagatcgccaaatccctctggacggaagaactcgaggaagccttgatggagaggaaactggacgtcatcgtccattgtctgaaagatatgcctacccagctcccggatcattgtgagatcggggcgatcctgccccgggagaacccgcacgacgcgttggtcgtcaaaaaggggttgacgtacgagaggttgagcgaattgcccgaggggagtgtggtcgggacgagcagcgtgagaaggatcgcacagatcaggaagatgtaccctgggttgaaagtcatggatatcaggggcaacttgtaagtcctcctgcgggtgatcttggtcgctgctacagactcgacgagcgatactgactcgactcttttgtagggacacgagactgcgtaaactggacgacccgaacggaccgttctcggccatcatcctcgccgccgcagggatgaaccggatgggctggcaagaccggatcacgtgtacgatgaagtccccagagatcctctacgctgtcgggcagggtgccctggcgctggagatccgggcgggggacgagagggtcaaacaggcgttgaggaacgtcggggattggaaagccgagtggagcacgggggcggagaggggattgttgagggaactcgaaggcgggtgtagcgtcccggtagggatcgaggcgtttatcgaggaagtcgatgcggggcaggcggggacgctagggcgacctttcccgggcaagggtgaagcgtttgacgaggaccttcccggggacgcgccgttattgcatcaatcgggcaagggcaagatggccaggttgcacgtgacggcgtgcgtaacctcgttggatggcaagagacaggtcatgcacgacgctggagaggtcctgatcaagagtttcttggaagcagacgcttggggacatcaagtggcaaaggagttgaaggacaagggtggaaaagagattttggacgagatcaatttggtcaggcagcagagggaggaagggttggcttagggtcgtcgatgacacactagacggcgttgaattccggttgtacactgtcaatgcgaatgagctgctatcgcgctgttgactctcgagtaggcgagtctacttgctacacgaagctacattgtttgtgacgccatgtccttgacagatctatcaaggatgctctaccgcatcgtcatctcggcggcctgcagggtgaggcgggggagcgggggggatcaatttctcggcatcaattgcttccgtatgtgccgtgtggctgtttatttgcttccgcgctcccgtcctcgcccttccctgtacgcgtttgtccgaaaggagcaagaatccaaagagtcaaagtcgaccaactcatcatcatccacaagtgtcgttcacttgttggacacctctgattatatgactagtagtgtagtatagacgtaggtagtcaggtcgttggtatcacaggccatccgccctacacagcctacttccacctcatcaatactctcctctgactcggacgcgggaaaagatgctacgatcaaagacgccttcgaaccaaggtctacgcgcctcgtcgacagcccacaattcaaacgcaaaccacgatgaacacgatcgaccgttgttcagaacgtaccgtcctggtcagtcccctgcgcggtcttgatgacgagcacgagtggtacgaggtagaacggcgtcggataggggtgcacagtgctcgtcggtcggtggaatatcagcgagacgcacgctgacgtatcttgatcatctcaatcctcgataccaaaccctatcccgccccccgacttcctttgatccccaacctcacccgtcgtccacctcgcatctccatcaacaccgccaatagccccgtctgcccattcgacgcacctgcacgtccgacccgacccgggcacgtccatgccctttgcccccgtcaaccgagccaagtttaggaaagatcacaagaccgccaatgataacgccgccctcgaccgattactcgccaccgagtttcaaagcggaagagagagtatcagcttgggctcggtcggggctcgtggggatggagcaggaggtggtggtggagggaccggcgcggggatccttcaatcggcgaaaggattgggtccggtcgtcttgcccacgacgtcgacgatgatgacagggggaggaaggaaatcgttcgatacctctactggaggtacaggtccgaacttgctaggaagacagacgagcgggggtaggaggatcagtcatgatcgagatcgaggccagatgggtctcgcacgcaatcttagcgagaaattaggcgtcaggcagggcacatcggatgcccctggacacgcctctgaagggccatttcgcgcgacaaagaggaggctaggttcggcgaggaggaacccaccgggtccgtccacgggtaacggatcgggtgacgagcaggaggaattatcttcccgcgccctcggggtgtatatcgaccaggaaggaagactgcacgacaaggagtacgacccctttgaaaaggtccgtagtctgagtcgacgcaaggtggagaaacgtcgcgtctttggagcggccagggaggatgagagcgaggtggggagtgagggcagtgggagcatggtcagcgggttcgcagggttcgacaacaggttgggagccgggtcgaggaataacaacaggcgggatcctcggcaatcatacgaccaggacgcgcacggtcgacagggacagggcgagagggaggacgaggagtggggttcaccgaacccggacgaatcgttgggtgcgaggacgaggtccaataccctctggagcgagtacgattcgggcatctcggcaacgtccccacgacccgtccacgcggactattccgagtttggtgacccgacctcgcccatgtacaccaaatctggaggcaagcgggacgacgtcgatcagggacctctttcgccgacatcgtcacagccgtcttccagccagtatgtcgctcagaggaacacatcgaggtctcagccgggttcagtcaagacggcgcataccctcggtctggccagattggaggagaggcccaggtcgttgttgttccccgcaaccccggcacagctggctgcgcagaagatcaaggagaggaatgaccctcgtagggtcggcgccggcaaggtttctcagcagcatcaccaccagcagcaccatcatcagcatcatcataggatgaacgacgtggtcatcgaggaggaaacccttcgtccgcccgttgcaccgttcaacccaatgttctcaaacgacaagcgcgggaaatcaccggccagctcgatcaaatcgggcaaggggaaacaacgggattccgcggagtcttcccggatgtatgggtatgaccagcatcagtccctgcacggcagacgagcctccacacagtctcaaccgcatcaacatcatgcggacgggtacggggcgaacaagtctatctcgggcgtccaacacgcctcgtcctcggtctttagcgcaggggacatgggatacctcccctcccgatgggcgaggggagagagggaattcagggaaggagaggaagaactggacaagtaccgtccgatggagtttaggggtacgagagaggatcaaaaggaacccgagtgggcgtgagttcaagacggtctcgatatggtcgtacggagtagagcgggcgcgtgctgatcgtcctgtttttcgtccgctcgctttagacccgggtgtatcgatcagatcaagcggaattggcacgaaatctcgctggcctttcgattcagcacgcaccgcgccaagaaaaaggtcgagagaaaggtcaggaatatgtagtggagggagtttggtccgtcgtgcttgctagaggttgtacggtcgctctttgtcgagcgggaatgaggccgggttgtattctcgaaatgtatgcatttcatctggcacgtagggtctcctcgcagatgataggcatcaggtgtcagggccatctcgctcgtccaggcccgattcctcttgcttttgtttgttctccatactcgcatacccacttggaatcttaaatggtaaagaccgacagtctgcaatacactgccgaaacaataagtcaaggaattatgcacttcgccaagggcctttgtcgatgctcaacgcagtgattgtcaaaggagcctcttcacaggtgcgcaagttgttgcgacagagcacaacggagacgtgatgtaggactagccagccacatttgtgttgcagaggtgctggtaacgatgccttgccagtcctcctttacctgccaatatctcctttacaaagccatgaggtgtttgtgtcgtttaccgaaggctgcccgactgtacggcacgtcactcacttttgtgtcccaatcacgcaatttagctcgtgataaaagccctctgaacaacccaatgggtcgcgatacctagatcatcgcgttctcggcaacgcgctgtcggccgtgacggggcgtgtattcgttgcggcatccatcgatggtgcagcgatcacattgcacgagatggctccacccactttatatacgatcggcatcagcgatcgtgaatcatcgcgaaatgatgacggggccaggtattcttgcagtgtccctaatacggacttgttcactgctggcgttgatgagatttacatgcaggaaagtaccgtatcctatgaggctatttctaccgagccttggaatcctacgcagctgatatacgtcgattatgacgacctaatagctgcggcacaattttacgatagtcgtgcaggattggaccgggtcgaggcgcgaatcgtgaacgaaacaccagcgcgcgtggggtacgccaagggcatagtctatcggggtgatgatacatttgtcctcgctctcgctaccttgcccttgggatctagaccgactaaggtcggtcgccgtatactcaaagtatcttggtgtgcggatactagcatctccatcaccaggatgttgaacaagcttaaagctggtccacgtagcatgggggaattcggacaacaagtgtacgactgtgcagtacagaaactgcggactggtgattggactggcctagtctccttcgtcagagactgcacgcctcgaggacgtccgagagattttagcgacagaggtccggtgtgttttttcacgactcaagaccctgatgcggataccagtgaagcgcaacaaagccagcgtgtcacttatagtatgaatacttcgatattaactggaagggaacactctcaacttttgcccagatcgagtacgccaagccggaatcctggacgacatataccgctaagaatacaggcaacctcccgcagcttcactatggacaggggtggctctggcactttctcagccccgcttcgacgagacttggtcgtttatgagaggaggcatcctgcccggcacgacattgccatgaagataactttcgagtacgcagcagccacgcaacaaagctcgagagaatttatgaccgtgatcggcttctccgaaggagctatatatcaagagcagatttgggtcttgattttgactcccactctatcgacccgagtggaagatctagattcgcactggcgttttgagggtaagtactacccaggtgaaccaataaaaatacgaggagtgatcatcggccaactggcctcgaaactagaccggcgcatcggaagatttcccgcaaaggcagtttctgcgactcgttacccaaagactattgaaaggcgatattggagatcgtttccagttcatcgatggcgagccgcctacaatggcgtgggagacaaggtccagattcgtcgtgatcaggaagggataatctcgtatattattgacaaagcagagcacgatcgccagaggtaccgtcagtagtttctgaacgatcgaaactcccaattccgcgacgaagaccgcggctaaactatacagtagtggtagcgagatagttatcgtatctgcggtgcttgtacagtctagcccgatgatacgcgcttacaggggttgtgacccacgagcttacatgcagtttcggtcacttgataggcgtcgaggcgatttttcccgaataagactcgtccaggaatatagcctaaagcaagtcatacagtaatagctgcttagatggccgccccagtcgtatcgtcacgctgtcgtgatgttcgccactacagggtggctcagtccgaggtcagggattgaagaacagtcgaggagcatcgctctcgatcgcagcaatgtgatcaaggccatacaggtattccctggaatagctcttagacaggccgttttctgggatcgccgcctgtctcaccatcagtacggccgcacaagtgtgcgactggcaggccgggattgatggcgatatattttctttgtagcgcgtgcgctcccttccaatgaagggctggaagcaaacatccgccaaacaattgtgtagcccgccggtatccttccaccacatagtccaatacggcagatcatcttcccgaccggcgagtctgaccgaagttcggccacaaatgggcgaggaagatagctgttgatttcgaagagaaatccggtcaaagcaagattttctcaaccttccgtcatgggttgccaagcaagcactattgacggctcgagatcatatgccaaggtcgcatcgcaatgaaatcaacaacatcggcggctggactttcataaacctcttgctagcccatgacaagcacgcggatttgcggtacctgtagaatgggcagacatcagggtgaaaacttatctcgagtacgcgacacgaccgataaacgtacagaaatatgtccgatatccaaacctattcccaaaggatacgagatcgtcaagaacgcgcgtttcaagatggaaacatcctatacttgggcggtttctgcgtttcatccaccctttcatcatggcccctccccgatgctgtatcggagagccgtgaagataggggtctcttgtgctgtaatccgcatccataagtagtgcgggttgtagacgaacaaggtcagacacctaaccatcttcctctgaatcttcaccacgccaggcatctgcatacatcctcaagtcgctgaggacaatcctatgcaacatgggttggaaagatggcagtgaattttccgggtttttctcgctacgtcaaccgaagagtgcgagtatcaatagctcccagaaaacacacactggcagatacgacagtcgcgacagttgcgacacccaaacctcccgccaatcgtcgctcgacggaacaatgtccagtggaaattcgacgctcggttctccaggtgccagcgagattgtaattactaccaggaggtcaagggctgttcacatcgatgaggatgcactcgtcacaaaagtttttcacttcgtgggtgacgagcaacatatcgtcgggtatatcgaggggatagtctatcggaagaacatgctggtcctgaccctggcaacgagtttcgatgaccagctgagagatgacaccttggtcatcagtaaaaagacattgagtgtcggtgcatgcatcatcgaagtcctgtggcgggagaaggaaatggacaacactatgaaagacctaaagcagcaactggcatgcatcgaagggatcggaacgtacggcaaagaggtgatcttgacggcatacagcaaggtcgaagggcgagaacaattatggaagcacgttggaaagtatcgtccaccttattatcccaacaaacacttcggctcatacatcaaagttccgcccgatcgcgagcggtgggtgcccataggagacgtgtctactcctaatctcgtgcggtctcctcaaatcggaggttcatggatgagtatccagagcaaagatgatcccaatcttgggccagtgtcgattcccagtttaatcaggcctatgcgacgtagttagattgtcaaattgctattccagagcggaagcagcgttagaccagctggccgaagacggcaaacgtcctgctttgactgagacctacgagccgatgacaaaatgaatttaccctgaaagtccatttgcgtgccgcgtttaatcaactgacatcttattgtaagttgtgccgtatgcgatgagcgcgggagacgtgatgagatctcaggaacattgacacgctatggaagacgaatctgggtttccttatcggtaagcattgacactgcagatattgctcgaccgatgtgttacccaaatttccttagcgaaagcgcgcgtctatcaggtccgtcccagaaatccgtaaacatcgatccgaaaacttaaacatctaggactttgaggatcatctgtctgccaccctgtacgcgacaactccagaggtatcagcctcgctggaacgatgattaaggttgcgagagtcaccattgctcacaaacagaccacgtcggggagggtcaatcatgcagcaagtaccatatccagttccacatcttgacgattttcttcgccttgcaaaactctcccatttgtcctctgtcaacatataagcccttctgacaacttgaaatacctagggatcgactgtccagcacaccaaaaattcttttgcgtgtcttccgtttgctctccgcgcctgagtagtgatcgctcgaaggtagggatactccgttcgaacagaatggctgacgatacgtaggcggcgaaacaaagcaagctacatttactgccaactattagctccactgactcagatatgcaggcgtctcttaaatacgctctcgatcaatcgcaccatcggcgatgtttcaagtccaccggaaattaagcgggatgatgccagggatgacgatcatatcgctaaatgctatttattaccgaggccacaaaaggagtagaagccatttagctgaacttgaatcccgtaattgagggtgatcattactacaactggaatcgtttgagctgccgaaaggaggacatgtttcgtttgagcaattctttgagcaaggcaaaaatgacgggatggcaatgtatgcttgatggcagctttcatcatgagggtccgcatgggatccatgtggtcactgatgtcatgaacatcaatttctatcgccctaagcacgtggtcgttgttgtgacgcgtgacgatatacgagtacgttaaatgtagttatattcatcatacgtagatgaggtgcattcgttgaaaggaaaccccgctgtcggtaggaaagtctatcgcttccacgatagaggatcagatttcatcctctgcagaaaccatatataaagcctacaagacaagcgggggatgggatcgatgctagatttcgattatcttcacactcccggatacaagtactgctctccaaggcaatcacatctgaattagcagttcattactatggcctacaaagccgatggtacgaccttgacgacgatatcggatgttagcgtaggctcggagaagtttggggacggtttctcgacgatttaccaaacgagtggtgatctttggaaccctatcaccggctcgaccggtttcgacggcgaagagaggaaagagtatctggaacgattatggatgacccatcgacataagatggtatccggttcttcatccgatgcgcaatactggtttggccaatttgttacgagccctcagccgcccgtgcagcctagccactttttcctcgccgtggtcagggtagcaaagctacgagaaaacagggatcaaggtgtagaatgggtcggctactggggttctcctaacgacatgcaggaaaagcttgtctcccaaggtgacaaatggtctgagggtacacatgctaggtgggccttttacacggccgcttgcgatgtcgatcataccgcccagtggaaagtcatcgaactcagaggcagccttagtttcttactgcactgagatgatggacaatctccaacttagtgtacattggcttctggtagggagagattagccctcaagactgatggactgatctgtatctatcatctatgcgaatgtacctgaaaatgctctagacttctagatcggcttgagaaacatgacgatgccactcactgactgccactaagacctgaaaggggggagtgtgagccggatgcaaatgattacgtaactcccgagtacacatctcggaagtatacacacacttcttcgagcagctcgggcaccagtcgccactcccgagggcgtacatctcgccaggatcaccttgactttttagtgacaactcgtcaagccgtcataccatgctcaactcgcctatctcgaccagttgaacttttcatctgcgataaaatggctcgtcgaagtgctgccagctcgaacgcggctacaccggctcccgccaacccacctcctacccaaggtgatgtcgtcgcggaccaacctgatgcagctccggctcctccacctcctacagccagaaggcggaacaacgtcgccggacctacttctgccttgaccagtttcctgagagtcagtctatagaacccccgcagtcgtgaacttgaacagagatagctcaaccagaccaatccgactctcgcataggaacatggtattcaagctaccatcggtcggtccggctggggttccgcccaaacaccttctactgcccaaccggcctctccgggaccttcttcgcccggtgcatcgactcctcaacctgaagcgggcccatcgacgacaaggggatcggaagctgcgactagtaggagtgctacgcctgccacgagggggagcaagaggccgaagggcagaggaagagtcgacgatgtgagtctcggcggcctttcccccacacatcccgtgttcctgtagctgacgagatttgataccggtaataggatatcgattcggacgatctcgacgacgagagctttgtcccagcgaagaagagcaggagagggatggacgatgacgacgatttcgtcgatgatgccatggtgcaagcgatcgggaacaccttgagagcggtcggagaattcatgagctgcaggaaatgcgatgttcagttcaccgtcgtacgtcaatcactcgttctctgctgcccagtcggcgtgtaccgtattcgcggaaagctgattcatccgcattcctgactcggtcacaaccttccagacggcatacaccaaacctcatccggctaatacgggatacttgtgctacgaatgcacactctctttcgggatcgacccgatggccaaatccaaaaagagggccgtcaagaagccggtagccaagaaggataagcgggccaaggtggtcagttatgaagagattaggggaccgctgcccctgggcgatttatgcatcaaggtcggtcgccatcgttgctcagcctcatatgggcgcacagaatcactgatcggttgcgaatcgcacgcgtttcagttgatcgggaaatatatcgaggacgtggaagcgcttggaaacatcggagcaaaatcgatggacaaggtctgcagaattatctcgaagagcaggcgactgtgagtcttgcccctatacgattgatgtcgatcgaaaacagcactaacgcccttcggttcgcaggacggcggatacggcgacgttgttctatgcggccgagaggactcagctgaagatgtacgattgtaccagtaagtcgttcagccctgttctgcattttcagtccctcagacaggtattcaacgctggtggtcaaattcagatctcataccggcgagctacttgactctcgctgcgctttgcccgaatttggaggagctctcgctcgagctttgtggtcagcttgataccgacacggtggtcaagtggggccaggtcttcccgcacttgagaaaggtagagctttggggaccgttcaacgtgaggaaggaggcatggatcaggtttttcaaggacaggggggagacgttggaagggttgctcatcacgtcagtcggcgaggtttaatcggaacagcccgacatcttgactgactccgctctccctgcatcacaggcaatcgccgaggttcgataaagagtgtctagagacgatggttcaacattgtccgaatatccgggaattgaaaatgcgcgaattcggtctgcttgcggacgactggttgcccatcatcggtcgactggagaagctcgagtcactcgacctctcggcaccgggtcatgcgtcactcaccgacaagcccgtcactgagctgctcgagaagatcggaggcggtctggattacctcagcctggaagaccacatcaggcttacggataaagtcttgctagagggaatcgcgccacactgtcctgtcatccggaggctcaacatgaccaacgttgccgactacacacctcctcaggaagatgaccagtaccaaaagacgggaatcagcaacgagggtgtggccgcgttcttccaagcgtggaagaagaatggacacgatggcctgtttgtagcagagttcaacttgaatcacgacctcaaggaagacgctttgagggcgctgttggatcattctggacgtacactggagaggctggacatcaaaggatggagaaccgtatcagaagaggcactcaatgagatcggcaccagatgcccaaacttgaagtacctcaacgtcggatggtgcaggatgttgacagactttacgatgaaggagattctggatgggtgtgaacacattcagacgatcaaggcttggggtgagtccagagagcgctcgatgttctttctgcttaccgcgatatgggggctgattaagaacaacaaactgtcttcaggctgtaacaagctcaccgacaatgtcccgcgtaaaaagggctgcagggttactgggatcgaggctcatgccatcggcgcatgagcaacaggataacacgttattgtgacgacatcgtcaaccacttgggattgatcatgtgttcggggctacatacctatagaactttgggatccgatcgccagaacgagttgtatatgcggtatcggccatgttgttatgttatgtttctagcggatatgcagaccgccgacagaagctctcaagctcactcgaggcaatccctggctggacgtccgatctacgcattatcaggaagccccatatctttatcagaatgttcgaggagtgtgagcgaacgagcggttctgtcgagatcgttttgatggctcttgagctcttgcttgagaactcgcgttgtcggtctggagcctcaggtcagcccaaatcatccaagttattttgcgtacgttcaatctggaaggcctcatcgattaaagcagcagccactcagtcattagaagctcacgcataaagattcaagcgtatgcgagcggatgtctatccataatctgaaggcatgagcgaggccggctctggaacgtcagcaagaaagctgctagatcggtgagtgtgccgagccgaatggaagttcgatcatccccttacaattcgtttgactgcgatcaatcgtctgcctctagaccgaccaccctcaggaaatgtgagcatgatctttgcttccagtggtgaacatcctctgacgtatatggatcagcttgcgatttatgtcacttagcgaaacaggtcagctcaactttagcagtcccagaacgaggcttcctgctaaacacctgtgtccccaacagaaatgctcccagacaaagcctagctgtttgcgatgcacacagagcggatggaattgcgtctatactgcacgggctcgtcgcaggccgcctaacaaaaagccctgcgtagaaccaacagccaacccgaccgtacgtagtgatcggccgagacctgagaggaacgggtcggatgcggggtcatcgggcttggactttctgcctgagcagaacgagcaacccgaagcgggacccagtaggctactaaatagcccggtcaagagaccgcacaagcgacggaaaggcggcgaggcgtacgatctcgatgtgacttatagttactcggaaggcaaggtacatgaggccggaaatggcttgcctaaatcaagaggagagggaggcggtgggttcgttaggaggaacacaaaaggcaaagaattacttatgactgccaaggaatatgtaagcagctcgtggtgcatcgagcattgccgacgaacctaacgcctgtcttgcagttgcggtgcatacaagcagacgggcacctcgatggtgtggacttgctcaagttcctgcagctggcggaaccttcagtttccgcgcccacaccgactcccgtaccgcttgctttgcctgtccaggtcgagaacgtagaaatagacaagatgatcatggagtcgatatcggaggagctgccagccgatgtgcatgtgcactcggatccatatgatgaacaacctttcgaggaagaggatgtagagctcgatatcggcaccacggccattcaggaagacggcactccaccccacatacactttgcagttgaagaatcggcggacatgcggttttttgctaggagcaactcgatgccgcccgtctcttcactaccgccactcgagatgacgtcgttgctggcctctcaagcagcaccatactcgcctagaagccactacctcacagagggactcgacctagcggcgtcgaatcggactccgaccgtgtcgtcgttcgacgatgctgcggccctggtcagaccgtttgcgaacaccgcctggaacgcaacaataccgatgccaaaaccgtacgacccgcaaaccatcatctctcagagccattacgcttccagtcccttgaccactcccccggtcgagtctcgggatccccgtcctccgtccgagatgagcacggcaaattgggaatttgtggggctgggccaagccacagcataccgctcgcactcctccctacaaagagcccactccgtaccacagtcaccattccccacgcaacatttcggttcgatccctcacgtcacaggacctgtcagcgtggtcggcgattttggaccaactgacggcacggaattccctgcgcctagtccgtatgccgtagagaccgtgatcaatggaggtctcattccccgtcacggggatggacatttccttgcaacctccggcggcctcatgaacacgagagactcgcccgacgttgatgtggacatgtctggattgctcaacactgaaatggaagaggacgaaaacgggattcgacaagtgaccgtggtcaacattcagtccaatggacctgccggtggagaccaggatgcagatgacggtttgaccatcgtctgtcatcatgaggcggacatttcgcacacgctattcgctctcgacgcactcggacgtcccggcgaaatgtcactgattagtgtctttccccacttgacacgatctctggagatcttgttagctgctacactctgtgcgaaatgtgccacttcgccattggtcacactcggtcaactggcccttctctcccgcacgtgcgatgtgctgcggtaccctcatcctatcactccgtcgccacttcctctgataatcgctggcggtcgaacaaccatgaccggactggcgcctgagatcgaggttcatattatcgatgtcatttgggcgacctggcgaggctcatctatacagaaaatctgtagcgctatgaagaaacaggcaaacgagacgctcatcaaggttcaagaggaggaatccaggcggaaagcggagcgcgaagaggtcgacgagttgggtgatgacgacgaggagtttacggtggaaggagcgtctcctaagaagcctattcgtagtgcggccgagatcgggcagtacgttgtccgagaagtcaacggagtggtctttcacgagcaggtcacagacacttcgtcgcgcttaaattcatcggcggtcgttctcgaggtggaccctcgtgtaacacgggccttgttcatcgttcaggcgattgaaatcttgtcacggataccttccaagtaggcttggcaagagatcattccacgttgttggtctaattcaggctgcgagatatatggtcaacttgactcgacgttcgaattacctccgttgcgggcgatatccggaccgggccccacatgacgacttttggttggatatgctcctgagagcgcatcttacgggactgcgggagactgcgaacgttgtcatcatgcatcttgcgacatgatacgagatatatactacagctagtgcaaaatgacccatgcaggacaaaggaccacccctgtctggcctttccatcctttgtattctcgctgcaaacgcaacaacctgaggacatcgagatacagatttctaccttatcgaccatgaccgactcgatcgaattaccggttctaagccacctaggccacggaaaggccagagaacgaaactcatccaagacttctttgagaatgcccgataccgttgccccaagctctactatgggagcagcttctggatcgcttgggcctatcgaagcccaagagatccctggaatcaccctcatcaacagtcgggattcgggtgaagccgatcctctgctcctcagagacaaaatcgtctcggagggcgaattgactgaaatccgcaagtgagtcgtgtggaatacaaaaatctgatacaaaatcacttgatcgtctaaccgttgctctgcagccgaaagaaaggaaagggaaagaaaatctcggacttttacgccgagcagaatgaacatatcggcaatctgctcaaacccctcaaggttcactctgaggaagcgatggccgatatggccgacaacgccaagagtgtcagatgggctatcaggctgtccttgtatgccaacttcgtcttggccgggcttcaggtcagttcgaggtctaagatcacatctaccaagtggtcgaggctaacgaatcacttgacccttacagctatatgcagctgtctcgtcgctctcgttgtctctcttcgcaacatgtatcgatgctggtgagcctcacatccagagtgctgttcagcagtctgcttactagctatgtccgtttatagtattcgacccgtttgccaacatactcttgaacgtcctgcacaagaggagtctgaaggcggacgagaagaaatggcctatgggtggatcgaggttcgaatctagtcagtatcttagccagcacaatcggttcactgtcaaagatactgataaatacacgcatccagtgtaagcattgtcctatcctatagaaaggcgatacccggcctttgaccatcgataccttcagcgggaacatcgtttacggtgccttgatggggatggtcaacttgatcctcatcgtgcgtgtcgaatccatagctgatcgcgaaaacgtatatgttgactccaatgctttacaggtcgagtccattcgaagccttgctacccgggaaagcgatgacgagactaacgagatttacattcccgccctggttgctgttggtatcgctttttgtgagcacattcgactagaccgtagaccatatctttgcatagactgatggttcaaacatggcaggcacgaaactcgccctgttcgtcttttgtttctcgatcaggaagaagtcgagccaggtccaggtgttgtatgaggaccacaggaacgatctatttgtgtgagtgtcgaatagcgatcgcaaatcttggaagtgactttaagcttacccgtcgcaacttggtggtagtaacgggttcgtgattcttcgccggagtgatacccttgattatggccttctgacgattcgcgatcggttagatttggtatcttcaccgctgcggccggtgccaagattcgatggtgggcaagttaactcaagcccttcatgagtagcgattatcacgctgataatgatgctatcgttctttttccggtctgctcagatggaccccatgggtgctatgatcatcgccactgccatcatctttgcttggagcaggacaatctttggtaagcgcggtcgctcgctcaaacactgtagactcaagctaataaaataccggcgcagcacaattcaagctgctcgctgggattgctgcaccggtcgatttccagcagctggtcatctacaaggtgagggcctgacgagacctagctagcattcacatggaatttacacgcctcgactcgatgttaggcaatgacttttaacccagcgatcaagcagatcgacacctgtcgtgtgtaccattctgggccaaactactttgtcgaggtggacatcgtcatggacggtgatatgcccctttggcgagcgcacgatattgctcaagaccttcaagaccaggttgaaaagctgccggatgtcgaccgctgcttcgtgcacatcgatcacgagactgaccacaagccggtaagtgagcagatctcagcagaatcttggcaagttgactgatctcctcggtatcacaacgcaggaacatcggcgacacttgtagtccactcgatgggcggaagaagccggcttcggtatgatgtgcatgcatatcattatggtcggaactttcgattacgaacgagaacaagtcgctgtactttttgcttcccgaacaccgagatcgaggatatatgtcaagaaatcactatctgagcctcagtgtggcgtgtgtgtaaagtatcctgtctgatcctgtcgagaccctcctcgcgtcttcgctccctcagcagcttgaggtgatgtgccggttggcggcaaggtagaaattcgatcttggctgggcgtataagcaggggccgagatgctcaagtgttgcaattcgtagggcgttcctgaaccttccgctggtgattgcggaccagctctccccatcgggaatggaggtgggacttgcgagccaggagcgttccatggatatggatcgtgtaccctggatgcaagttccgagaacgatggcagctgtttgcttccagtaggtgaaagcgaaggaatcgaggacgcctcggacaaggaaccgataagctcatgcacgctgcggggcgttgagatgtgcgatggcgtcgatgcggagccgggacgcttcgatactctctcaagaccgatgacgaggtcatttttaccagccatgaaccactgctttgggtcgttccgagcaacgatttgataggtcgagtattcgccactcagatccttgaggcgtacgatcgcgataccacggtgctgctcatcttgcgagaggtatgtcaccatttcctcttcggtattgatggcgataggcatgatcggccgggatgccgagacgccctcgatcgtgcttgggtccacgacgacatcgtgatcctcgggcggctgccccgtactcgcatggagtcgctccctctcacgctgcctggcgttctcgagttgccctcttgtaaccaaggcgcagaacaccgcgtcccgcactttgtctcgatcatccggatggataaagtcgagaaaagggtagttgacacattgtttgtctaacaccgtgcctcggtcaccgaacgtgagcgtgttgccgttgaacgggatgatgcccgtgaggaggagatcgttgcgaatggtcacaaccgcttcgagatcgagcgagcctgtgacgcgaggacagccttcaggctcggtgagcgagacaccgagacccttgtcttgggcaatccggcgatgtcgaggatcgtccgaaatccgccgtgtacgggcgtgctcgtagggcgaatggatggcctgactttgacggcgaagaaagccctcgtgcgtgtctcgcgaacgtgaatccgcggggaggtaaaggggttccgcttcataggaagaccctcgtgggaggaacgcttcgctagcctgataaggcgagcgattagatgatggcgttgggatgaccccggtcgaaagatttctgctggtggtcacgagcttcgggcggcctcgtttcttgtgctgtaacaacacaagagagtgagttggtcatcggacgtcttaattgacccaaaggtgcagagtcgcttactggaacatcgatgcatccctctgggcgtccgatccctatacaacgcttgcagggtctggcagctgttgatgcgaacgagcaccgcacgtcacgtaagaacccgtcagctactgatcgctcaaacatctctagccggacgatgctgcttactgtcacatgctagatgagctcttcaaagtagacgtcggaaggaaagatccgcgtttcaggatcgttcacgccgggcaacagacggccgggaaagaagggaggggaaaaagactccgcgagaatcagccagaagaacttgtccgagagacggatcgtgagtggcgaaaacgaccctgaacgctcactttttgcaggctgaacatgctgcgggtgtgttgctcttcccggttatcctctttctcgatgaactcggaatgaccgaggtatattccggatgcccaaaaacggagacaccggaggtattcaccccctgatgttctgagcccctcggatagtattgtgggtgatcgagcatcggctggccaagtcgatcgggcaacgaagatggacctgcatcgggcgggtactgaggaaaaccaaatacaggttgtgccgaaccggatgatacctgatgggaagcaaggtgccgagaggcgtaacgcggcgatgtggcgctagggtaaggcgccggaccgtgactgcgagaggcgtagcgtaaagggctgtctcgaacgacctgatgaccggcctgataaggcgaagaagcctcgccgaattgccttcgctgttcgtggtgagattcgtcctgttggtcatgatcaagtcgttgatgatagtatgttctgggtgattcaaacgccagccccgcactattcggcatcgacgaagacgatggctctggccgtaataccgcagagaatgcgctctcaggtcgcatcgcagttgacagtctaagggcttcgttgcgataccccattaatctcggagggggcaccgaatccgccgtgctgctagtcgacgattttcgcgaatcgtccgcgtatttctcccggtcgacgtctgcctcgagcctttgtgagcgcgacaagttgcgttcggcggaatccgttgcatcaaagctcgtctctgttgatgagaggatcgatttctcatcgtgatgccttgaagggatcgaccaagcgcctcgaggatgatgagggtcctcttcctccttgacgattagtcgacctggaggagcttgtagtgaggatagtggatgtagagcgggttcggattcaagatccgggatctggctgatcaaccccggagagcgagtgtgcataatgatcaagcgttgtcgagctatgacgttgtccgctgttgctcgagtgaccgtggagccggtcgaatagcgcaggtcgcgtgtgatcgacttgatgaagtttagtgtcaatgtcgagtcgatgtaaagctcggataaacggagctttgctgaaattcggtgaaagcgtatacggatggctgcatgaaggtgctcgagagggtcaattttctgagcgtccttgctgttctgggacagattccttcaaagtgctgcggtcaacttcttgagctgctcgacgtgtttcgcgtcgtcaacaagcgacatatacccaatgaatacgcggcattcgaccgtgcgttcgtggtcgtcgtcgtcgtagccggtcgaatcagccacgtcgtaaagatgattcgaccgtcgtcgagatttgattatatcgaagtttcgccggttacgcgtttttttgtcggcgtttccattcgttccatcggttccgagaggggtttccacgatagaaaggacaacaggaacatgcggaagaggacgggagacgaacaacgtgagaaaaaggaaaagcacaagaacacaagtaaagggtaaaggtgcgagtcagttacgacaatcctcgtggtatcatttcaaaggggattgctctcgaaaggtctcgagcggatgcggcgggcacaagggctgtgtgcacgaaggtggatagagttgaacgggactgacctttggtttctcttgtaatttgatcggcgggaggacggatcaggcgagcgaagatcctgtccaagaggttgggcgaaatgatagagtcttgaaagggtgtcgacctttatgtacttgcgtgcttgaatttgggatgatctcggggttacgcaaagtcggtggtccgaacagaggtggattgtgcgacgagtcgcgagtcgcaagtcgtccttgattcgggtctcgaataccaaagtatgtcactttgtcgtcggtagctcagagtgattcggtggcttgtgtctatgattttgatcaggtttcggccgaaatcccgagaaacgtgctcgtgcttgttgcccttcctacctttgggtttggtacctcgtgatcgagtcgcttcagtagtagcttgttgaggtcgaagatctctatcggcctatcggtgagatccgtgtcgtctcgtctacagctagatctcggagattcaccaatgtccgggaaaaagagagtcgtttccaagtttcgcgagatccccctcgctcttctaccggcgggtacctttctgccttgtccttgttgtgccgccgatcgtaggcgagagaaggaaagattcgaccaaaggaaggcgtcagatgatgatccggttctcgctaatcaccgacgcccacgggcggacgggcgggcaggacgacggacgacaaggatgaaacgtgatgtaggactaccacctatcgcttgtcgcactgtggaacgcgagacgactcggcgagacacggacgcgggcagtttagtgagtgtagccgttcgataacgatggatcccgtctttgcgtgctgattgatctgatgggaggttgaaacgcgctccaaacgaggtggtctcgcgaatcgtgtctcggagacggaaagtcaagtagcgaagggtcctttgatccgattgttgtcaaagttggtacggatatagtgagctagtgatcggaacggtttgagggctgtttgctgttcttggtagtcctgtgggctcgtgtcactgcaaccagctcgtgggcttgtcaagaagctcaaattccaggctgcacgtcgaaacattaatacagcgtatcggaggttagccggatagattgccaagagacccgataatctacgcactcacgcaagctagcggatcttctctgcttcaaacgatacctccagaagaatgactctcaaatctccggaacgtcaagtccttggcagtatgaaagatgatgggggaatagaacttccggtcgtagtacgtcgacgtttatacgcccttcttaatgaccccttagataacgccgatccttggtataaattgcgtgtcaaaaccgccgagccttgtcgaggtcgtccggaccgaccctcctgatatggagactgttcgcttactccgtcaggaggactagttgacctctctgctccgcgacgagacgagctcgggggtgatagatgccggtagtaacggggtatgttgcagtagcaaatcggtttaggttggttccgtccttttcgagcagatctctcccgtctacgacgttttagctcgttgcacagctgacgacgtacgattcggtgacgatggactagggccgtagaggttgatcgcctacgtagttcggtcgggcaagaccttgacacgagtcaattcttcatagctgaacaacagcaagtcccagtcggctgacccgacaaccattcctctcgtctagtcgtttctaccttggccaccaggctgactcggctccggcgtcgagcgacagggatgattgtacgcagctaaaaggcagcggcagcagaagagggacggaaacttgcacggccaagcagggggtaacaccgagagccgcaggggcggacagaaagttctttcgcttgtcatattcgcgaattgggcttcggatgcaggtgacaacgccacaccaccatgccatgtctcgctctgcctagtcgagctttcgtggctgagattacagtgacatgcggtaacgctaatgctaaacggactgctcgcttccgggagggggatcagtcaagatgcttccgggatcccacaacgtgcagtgtcgggccgcctcaagaccgatcgagagacaaacagtccgaccgggtaattcgggggataaggctgtggggtgggtgtgagcgtgatgacgatcagggcataggcccggctcagacgagttcacgcccggaatccgtgttaacaacagacgagaacgagcgttcctcttcggaatgaaagctggacattgcgtgagagaaagagagagtggagctgaagtctaccttttcgggcgattgctgagaccgacacgaccgatgacatttagcccttgccctgaagctagaagttgtggtccgcaggcgaaacccagcagccgtgcatgaaccactactgacatcacgtctggcttctggaagttcgctggcagcgatcttgctgttgaaaacaaacggatctcgggcaaggccggggatttgctagctgtttacccccgaagcgcttatccgccgcgggtgagatgacctggcgtttcggggggtatcgagatggcgagcttcgggtcagagaggatgttttgctaatgtgacaccgactgtgacggaaactgtgaaagaaaaggaagctgtatgcctgaatgctacgagatttttgagccatgctgtgtacatcgtgtcaagaggaaccctctcgatagccgcgtggggcacgcgtgagctatgtgcggatgaccggtcaatcagccccgcagcggggccgcagtgccgcggtctcataccaagagaccgttcggatctagtccatgaccagctgtttgtcgaccgatgaaaagttggaaaagtaggtcgcaaacagtttgatcaagtactccggatcctacgaaaccaggcggagcgactcgtcagcgcccggtatacgagctgaatcaaggagtcccgactcactttagtccctgcggtttctcgaatactgtgcatggacaattgtggcaacccaatgtcgacggtcctcaatccatgcgtactgatcgccggtccaatagtgcttccgcacgagccgtcgtttctgacctcgaattcttgcaagggcacatcggccaggtcggcgactcggcgaattacaaacgtggtcgaggcgttcgaggtgtagcgctggttcgcgttggtcttgatgatgacaccctggttgatctgcgggcggtgtgcctcttggtatttggcctcgaagttggggttgagctgaaccgcacgaatcggttagcgccagcgttggcctcaataacggaacgcccttttgacctaccgcatgacccatatcgctgctaatcaagaacgaattcttgaggaactgagcgttgctgcactcgacaaacttgggcatcgacaacaggttctcgacgagcgaggggacgagatcgctctcggctccttgataagagacggaaccgacctcttcctatgcgcgcaagtcggatcaatcgatcgggtgaatcccggaaaattgaagtctgaactcacattgtcgaataagcagacggtcctgatgttggtctcctggtcattagaagacagcaactcgtctgtaccagtcgattcgatcaaaccctcgatcgaacagtaactacggcaccacaagcggcggtcgtcagtttcagatccgggcagcccattgagagctggggtcactcaccaggtcatgaggttgtcgatcctgaggcgaccgaaagcgttagcagctcattcggcttcctcgaccgagaggtcgagatccattcggactcacctggcggtatgcaagaattcgttcttcagaccactgacgctcccgagctgagtgtcgtacaacgacctgcgcaaccggcagaattgctcagctatcgtcttcatctccccggattctcgcccggacccacagctcgaaatcttggatgtcgtccacctgaacaccgagctcttcggcgaggacggtaagcaaagcggtatcgtgacgggacttgatgtcttccttgttaggctcagacttggaaggctcgtcggtcgtagaaggagcattggcggccttggagaccaggcccatgattggctgtggagataagcaacgaggagaatcagatgtattcctacttcgtgcgtaaaagagagaggggggattgactgacctggaattcggtctctttgttgaatttccagctctcgttgatagtcctgtcgagatgaatagctatgacgtggacgatgtcacgatcagtcagactttgactgatgctgcgatcttgatttcggcccaacactcaccgagagtggggatcctgaagagaggacgatcgatcttgaccagacgagacgagaaattcttgccagggccatccgagatgatcacccgaccggcgatagaaaggtctcgatcgaactgtcgatgacaacgatgcggatatcagtccagcgcattgacgcaacacgccatcggatcaaagtgctcacccaactagcccagatcccacctccataagtctcgactccagccatgaggtaagaccccttggtcttcttagagatcggtcgaagtttgggacaagggctatccgtatgccctgcgacgatgctcatccctacatccctcgcctgcttgtgcggcaaggcaaaagcgaccagactactctgattcctcgtatagaagtacttcccaccacgttgaatctttccctcgctgaacgatcgggcaaagtcatcccgttcggagattttgacgaatccagctttgaggagcgattggctcgcagtctgcaccgcgtggaaaggggtaggggaagcgtcggcgaacttgagaaaaccgatggctttcttgagattggccgagttgatcgaaaggcctttgaggccggtgttgagtagcatctcgggagacgatgggggagaaggactgtgaggccgagaagcggttcgggtggtcatgggagacgtgtttgatgacgagtcgtgcgtggtagtctgatgtggtattgatgcgaatgacgatagatcgggggctgagcacggttcgtttgggcaatctttttaaaggataaagactgacgacctatgataccgaaaggattgtcgctctgtagatacgatagagtctgtatgtcgtgaacaggcagacctggttgcgtgtgtgcgaacaaacgatcgatctatcgacctcgtgacggattttcggtcaaatccgtggtcgacgaggaggatcatgacagaaaccgatcaaatcatcccggtggtgatcgatctaattgctaattgatattttattcatatattattattgtattcgattctctgctccttcataaaacaagggcgattgctttgaagtctccccatctgggcattttcatacctcgtgtgaaacgaaagtatatgatgtgttcgatcgatcggtcgaaacaagacggccttgtctggactgataaatgtacaacccacaatgtcgcatgtttcacggaacggccgagagctgctcgcccagccctgacgtggcccagtcgagcgaccaagtctcatcgatttggtgggtcattcgagtgtcaaagtcctgatgatacttgaaaggttcctcgaccaccctcttcgctaggttctgccaaaatcctttgtcgtattcgtccgaatgactcgggtcgttggccttggcctgacacatcgccaataactgtgtcttgctggatgcacttatgaagggactttctggctcgtcggggttgatgcaaccaccaatccatcgaatatcttccagtaactgttggcaccagtacaccagcttcgaaggcgcgggtccaccagattgcccgtctgttttgactttcttcattatcgagcgggaagcttcggaatcggcgtcgctgccgttggtatacacatcctcaaagactcgtttaggtagtgagtctctcgacagtgacagcacatgctcagtcaagtcgccaatggtacccttaccgtagaagaactcggatccttgactctgagccatttcgtccaagccttcggactggagggaatcggacatgtgcgtggatccttgggcatcttcgttcatatcagattccttcgcggaatacgcaggtggtgctccctcaaaatcacattcgggcaaacgctcgagcttctccgcgagtagagcgagaaagtgtgctttggtcttgtcttccgaaatagcttgcctctgctggatggcaagctcgcaccagtgaatcaactcggcttttgtacgctgaggcgctatattcgagcccatacactcgaatgaccacttttggccttcaccttcctgaacgcggacaaactcgacttcgctcagtctggctttggcttcttcgtcctcgcgagcgctgtccagcaaagcttgtcgatcctgttcgagccgagcgatctcttcgttgtacaatcgttgttgagcgtcgaaggaacggtcggaaacaatgctcccgctcctgctgccatcgatatgcgaggaggatacgtagctgtttggagacaagcctccgtataagccttcaggctctgcggtattgacgctcggcacagtgagaaatccggaagcattcagaagctcttgttgttcttcttgttgataggacattaggcaggtctttcgctggtttgtgtcgatgagcagttcgaaagatggcccttactcccttatcacacatcgtaccattgccctgctatatatgcctcctagagatctgtgtttcaaaaatcgatgaaaggagcaaaatgagatggtgcgattacacagcaggattgtgcgagacggatcccagggtaacaggggcaatactgccaatcatcacgccacctctcttgtgcgttcgcatggtacacgacgtgatttccgtgacgagggtattacggataacgaccgatggcgatacgagcgtcagatgcgcgcgatagcggcgtcatgctcgtagaacgtgctcgatcacacttttatgaggggattatcgtagatgctaggtcggtcccttccggatcaggtcaggcatacggggaccaaagtaacagccgcgagctcgctttgcattctctcctccaccaacccgatggactggaaactcatacgctgaaacaagtggatgacgaccgcgacttcgtcgcactcggctgaccccgataaagcagatggatggtggtatatttacaaaatccccctgcttttcagtcaccttctgccatgagacgaaggctctttttcgaaggaaaatcagatagtaaggtgttcagatgttcccgaaggaaattcgacagattaggctctctttgcaattcttccagcttcgctctcaatttcgtgaagctttgtgtcccgattttcgtcaccttcgtctgcgtagtggtatccttatagagctgtgcatccgtgtgggctcgtggatgccagcagtacatgatctgtccgccatgcagtcgcttgtagatggtcggctcgctggaatagccgagactattgaaacctctgcgtgccgcgagagagtccaagtcgatcttagcagttgatgaagatggggcgatgtcatgactttccgtaccgaccggacgctgggcgctgtcagcaggttccaagttcccgctagtcggatcaactgagataccatcgaggagggaggagttatcggacacgtttcgttcagagctcaagctatgtacccggttcaatgaggtctgggtggtgaggggggggggggggtttgttaatgatctttcagggtctcgtgcgagtgatttctggtgaagaaactgggggaattgcaatataaatagtcaaacggagtggcttcccagaattgatgccaaaaccagtcgctagaccctcaaaggaagacacacacagccacaatgggtgctgaatcacacctggtcagttttgcatcacgagataattgattactccactagaatgctgacaccagcccatcgcgccacaacccccaatggccaaatcgaatcaggtcaagctatacaccaagtcacgtctattattctcggctacgggttttaaatcgccaagcaatgaaaggattactcagagcaagcgatgcatgagacacggcgcgttatggcgcaatggatgtgagagacgtgagatacgacagggtccacgcactgtggttgcagatacagcgtggcgataccgtatgatacttgatcaagtgatcaatatgactgagtctgtaaatcgagacaaagcaaagcaggcgagcggcaagagtgtagtcgaggcttacgagcggcagcgcaagatggccaccgccagcagcccggtcatggtaccaagccagctttccaggaatcctattcgtacattcttctaaatgagcaagtcttgggacggcgggtgagctgtcacatcatctgaagatcaacatgggctgaaacgaggccagaaaagcggtcgcacgggggcgtaattgagttgatcacgtaatgatgccggcatcagactgaatgcaataatcacgtgaccatcatcgcgcatccagcgagtcggtgatgacgagggtgatggccgtggtcgagcagttcaagttgggtcgttatcatcgttttgttggatggtcaatcgtttgttctccgtacgtctatctcgttctcagtacgaaaggtttgatcggatcatcaacaagatggtaagtcgggagatttcccgtcgcttcgatttacggactcatcgcgttaccgtacctcccagtcaaacacacttcgaccatacctcaatgccgtcaggagtaccctgacagcggctctcacgctggagaacttctcgtctcaagtacgtatcatgaacaggacggatagttcgttctccagttgatccactgggactcctccggcaggttgtagaaaggcacaactaccctgaggtcgaggcagggtgagtcggcctgtcttgcacgagccgtcctcggcggcacagctcatatagctgacaccaacattattcggatcacttcagaaactcccaagagacccttctccagcccctcctcatctcccgtaacgaatccgaacgcgtcctcatcgaacccagtatcaactcgatcaggctctccatctgcatcaaacaggccgacgagatcgagaggatcttgtgtaaaaagtttaccaggttcatgactatgcgagccgagggtttcgtcatcttgaggaggaaagccatcgaggtaagtcacgcttgggtacatcggatcaggcgtgagggtgtacaagctgatacggttcgatgtggtacgaacagggttatgacatttcgttcttgatcaccaactaccactcggagaccatgttgaagcacaagctcgtagactttatcatccagtgcgtcaatctctgcccggaatgacctcgtgttttcactgacaaacatgctgtatggaaatactgctttacctgtgccgcgtgatctggcttataggtttatggaagacgtcgacaaggagatctccgagatgaagctgtccctgaacgcccgagcccgtatcgtagccgagagttacctcgtcaccgtaagtagtgatcgttatggttgctatcgatacaaaggcacccgtctgaaaatcgatgctggaacagttctcgtaatccctgcccccattcacaagaggcccaagatactggtcggaaggaaggcagttgtaagatcaaacagattttccctggtgtctcgctttgtatcggacattacatgacgtgctagaagatccagtgctatcgtcactgcggcctccgtggcgttcgccgcaatgcgagagcaccgcgcatgagcagaacggcttgcagaacaagattcagataccaatctttaattatcatctctcgcactccgatccaaatgtgaggtgtgacaacagcgcgagaaccacgagcaaatcattcctttcagtatctacccctggtctacgatcagcgtcagccgataagtctacgtaagctcgaaaataaatagggttatccccgtctttcgtcttgacgaccactcaaacctcattggacttagctactcataggtcttccgaaaatgtcttcgatcgcccagagtaccgatgcgtcatcgctggaggcgtcggagggacagcccgaagggtccagcaacatggctcctccaaacgattccaataccaacgataccaacgattccggtttgtcccgaatcgccatttttcaggtcggggaagctcatatccgtcttcaacactgggcgcaatttgaaaagcaagaaccggaagggaaggaacgcttagttggcgtgcagatacaatgccggatgcacttcgatggagaaactgatgttatacgcgtattgtggaagtcctccctggatcatgactggaagcccagcgacaccacatgggggcattggccagacctcttacagaagttcaaagatagcattgatgctgaggtgaaaaggcgcgccaaatgcaacgaagaacctcagtcccactggttcacgttgaaggccatctcggaattgttgaaggtagatgtctcacactgtagctcggactttgttttcgagaacgctatcgcagtcaataatcttggggagtttagcacgcttggtctttggccgtgcggaacctgtaaggcttggagggatgggccgagccataagggtccagcttaaggcagacttgtacggctgtcgacgccagtcgagctagaagtgtaccgctggatgcggtctaagaagatggacaccttcttgtaatggtacatttcttgcaacatcgtcactgccgaggataatagctgctgctgtcgaagagaagaggaaacaaaagagtagatcctgctagacgattgtaacgagcgcattcatttcatgactgctgactctggaattgatggcgatcgagagcgagagaggagcagagtgatataggcaggttcccaaatctcatctcatcggtagatggcgatattccgatcccgcgggaagccgaggagcgatcctcctctaagctcaatcgcaattcgcatggcaaccgcgtcacgtcgtgagttcacttatggtccatcgaaaaggaagtcgtcatggtctcatgcgattaggtcagcccactcctttcatggctttcaaatcccgatcggaaccacagcaggaccaggtgctttatactcagatctttgacgctggcacgtcccaatgcacagtacataaaggacagggatcgagcgaaccacggagaaatcgtatcgacaaaagtagacctcttcgtcaactcgattctctcaggtctagccgaatgccccacaaatactatcattattatttgcaagcaaagtgaacgtccgctgaaacctcgtacaatgaacgggtccgatgagttcgtctccctcggaggcgggtaccccaccaagggcgttgctcactcagcgtcgcaggaagcgacactgtcggtccagcatcagatcaagacgaagcggatccgagcagtattctttgtcactggagaagatgctatcgaactggtgaaagcttgccccgacgtcgaacaggccaggagcgttctatatgacatagcaaataggctgcatcaagaaagaccgtcagtggacctggtcgtcatcgagaacatgatggacagtatccgactctgtgacgatctcggtgaagacaaggtgagattttcagaaggcttctctctactacagcgagcgtcgaaagaacaggacgggaagtggaccatcgccggtgaaaccgctagcgatgctggagacaatttgaacgagatgtccgactctggaatccgtggggctgcaggatatgacagtactaacagcttcgactggacgacgtatactgtgggaaagccaatttccgaagaggatcagaacccgtcggccacagagacgacggatggagctacgagttccctggcttttccatagaattatcaaacgggactgcgcgatcgatatgacacaacgtccgcttagctcacattttgtggcggtagttgtgttgaaaggcgcaaatcgatagtgtttcacgccatacagtagcgcgagaatgtcgaactttgtgtcacgatatcatgacagagacaacgcagaatttccggattatacagctgaatggtcgatggcctcgtggtcactacgccttgcctgacagcctgatgaaagtgagagcactaacagcgacttgccacttatcattaaaaagtaaacctgcagcgactaaagctggttatactgagctactttaggcaatttgacacgatctaacctatcctgaaaccaggcttctttagcctttgagtgccttctttatgcttgctgtgcatttaacctcgttcgaaactcccatttggactgtcatgtgttcgacatcccgggcctgctggatcgaccataaatctgatctcgggcgcgacttgtcaaggtggcaacccgtcgccagcagaaggcgaagcttattcatgctggcagcacgcgattgatcacgtgggtaaccgcacaatacggtgtgcagctctagttttatagccttacatactttgtcagtcagtcagccatgggacgacatccgtcgcgtggatacgtacccgaaggcgatatcacgctgtcacattactatatatgagtgtgtcgatgaaccgcaaacgggaccagaaatggggccgtgcttcagaatattaccacgatccccgttcaggcgtgttataccgaaagtatcgacaattccaatccacaattttcaacagatggccgaacagacacaaaccaagtgcggcggttacagcatcggttcctcgttcatcccagcttccagcagaaccgacacagacttcggcatcagtgcggtctccaatccagctgcctcgactatcactcaagcaagcttcaagcccaatcccgttccaggcctttgtcatgcgcaaacttgtcttgaatcacaccgaaggagtcaatctgctggagttacacattcattacacgatcggcgatcagacgaaaagccggattgccaagaggatggtccagtgcgaggcagacgaaaggggaatggaactactaaaggatgctaagcaaaccatatccaatggagacgaagaagaactacgatgctgcgtagaagagatcttggacaatcatctgccgacacccacgctctccaaggtcagaaccgttgacacaagttcttttcagttacgcaaggccggtatttgggctagcacacccttcgcttagactgcgtaattagtctcctgagtatccgcttcgttaggtggatcgctcagtcgcacgcagagcagcgcttcactagcacaaaggatgccttctcaagacgcactctgaacgatatcgtgctggctgatcaatggattgtttaagagatatcaaagagctcgcgtgatttagattgacaattctattcacacgtgtaaatcgcatctgtctcgtaatcgagcacggtcacgccaaatgcgattgactctctttattcagccacaggtatttcatgtgctttaaccaggagttgcgacattcctgaacggtcgaggtttggatatcggcatgacaaggacttgtcccggaaggttgcattacatcaatgtatccgaaagtcgtcttttgtactgtaagactcgccgcgggctacacacctacagcctacagcgttgcagctgactcggctgaactgaacatccctttgcaataataatatgaacaaagaagcagtttagtaatggtcatgtgaccctttgtcaccgccaccccggtactcggaacttgaattaatcgttaagtagcgcgctgttttgaattcccgctctggggtgagtcaagtagatggactgagttcaatggaaagacgactcccgtggcttaagtatggcttgaatgaaatccacataaggtaattttcccgtcgaaaacgatgctcatctcatgcgattcaataatgaccataccttcgagcgccccaagtacagtatgtcaattacccttgataccggagtctcgtcacaagccaccgggcagacttcgaatccatctgaaagatctttgagaagcgcggatcagccacatgcttgctcgcatcattttgttttcattctctggtgcattagagagtggatgactgttatatgggacatttgggacgatcctgaccatcccgaggaggatggagaggtctgttggttctctctgacttttcctgagccatgcattaccacggacggcattgattcgtcgttgcgagatctgaacgagaatgtacaagacgagaagaccgatctggcgccgaacatgaagcaggtttggcataccgcaacggaaagattcatccgtaaatctcggatcagtccgcctttgcatggccctgaacggcggcagatctcgttcaagatgaaaatggtggttcaatcagaacccaattgactgtctatcgcttgtagtaggcatgctcatgtcacacgcttctccgtgaatcaagccccgacatgtcttcaacgatggcattgatgacgatctgtttgacggagtcttgaaaactcggaactcctcttccatgtgggccgtttgacaaaatcaaagagaacaaacagagcttcgccattcaaagtaagagatgggttccgatccggacaggacggaagtgaagtgcagcagagagcttggcacgataaaggggacgctgcacaaaggaagtgcgattgttctcgctgtcgtcaaccaggttatcgggacaagcgaagaggcgagacgacgccattcccactgttgtatgaaaagcgcattctggaatgtccaattgcgttttgcgatgggaagctccttcgaggcctcgtcaaggcagcgccatctagtctatttatctattcgctgtgccttccccattccgacttgaaaatgatctcacgtgtgttctgcagcaaaccgcgcgaaccgtccgcgaggaaccaaaccttccgttaagtcgtttcattcaagaacagataaaaggagtccctcccaatagccagaatcgcggacggtacgcatacacataagtacatgaatcatttatgtcctcctgcctcctggcgatcgtacctcgcttcgccagatcgcttatcgctcgcctgcattctgtggaagtcacgggaccagggtagctcctcactataaacttctacctcgttttgaataccttcggccagccttcgtcatgccgtcttccaatccttctgggaatagtctcgctggtacaagcactacattagagcctggtagcacgtccgctatgctttctgaccctacccttcacagcagccggacgaatgctggtggacgaacagacgacgctgcccagtctcaaatgatattggccgacttcatcgtcattaccagtgtagagaagctcgagattagcggagaacacttagtatcggtaggctttggcgaaggaacccggactgagcggttgaaatttagccacatggagttggagcacgggaatttgtggcctcgctcgaaagcagatgtcaagtggtgcttggaaaagctaggagaggagctaaccaacgcatatgtggatcctgcgatagctgaagatgttacagaagcgctactcgccatccacgacgagatcatgaaaaccgaagaactgttgcaacttctcatcccgtattcagcaaattgtatttcgccgaataacaagcgagagaagcggttctcaatgagaatgatgggactcagggatggaactgcatttatgtgggaatggttacggcaagacatagaatcagatcaaagcgtcgacgacacatcatcgtaggagaggacgatccccgcctcgtatacgtatgagcaaagtatgtgataggatgagccctagtactgtggctgctgtacgaccccgctggatccgactttccgatcattcgcaagtaacggatttccagttttgcccagcttaccttctattgaatcgattagggggatcgtatgtgtttcagttgatgaaaggaacgcaatgctgtaaaccgatgctatcgctcacatttccccccaatcccgtccctttataacggctagactgagtggatgcatctcgcacgagttggacggtactcgtctgtctcggtgtgcctcagcaaagacctgcgagaccccttaacccaatgctcgtagattgcactactagtacactgtccgcttgcagcaatctctcaaagcctcctacctatgactcgcaatcggcacctagcagcggcgtcacggaacgatcgactgggacccgcagagatctgactgtcgagcctgtgaccactgtgactttccgtttcaagctatctccggagagattggagatccagggcctgtcctggaggattacgaacggtgtctccgacttttacgaagaggagtgcctcgatgccgacgtgcaactcgctgaggagccgccgatcgagtctgtgaaggacctgaagaagtatctcgaattgacgttacgagagttcgacgccttcgaagtggaggtgccggttcagcgaaggaaagtgcttgcgggcagggccgcgatcgaagaagtgcttgatagttcgaagcatctagccgatttgcgggaaggaaagacggttgacgtgaaagtgatcgggagagaagattaagaagctaaaagcttctccaatgctggaactgcctaacttgtgccatgtcatttcatgtttttcattttccgattctcacatttccctcctttccgcctcgtcccgccagaatcgatccagccgacgtcgtgggcgtggagtctgatccgtttatagctcgagagcgcacgcagacacaggtcgaaatctactcggtggccttgcaaatgtcgataaactcgggcttgatcgaagctcctccgacgaggaatccatcgatatcggcctccttggctacgagtgcggcgttgacatacagacggaaacattatcagcatgccgatcccgtaaccaaagctaaacgagggagacacccaggggggactgacccaactctcggcagttcttgccgttgacgcttcctccgtagatgatcctgatcttgtcagcgaccgattgggagaccttgctggccatccatttacggagagaagcgtgcacctcttgagcttgttgaggggtctgccgggggaagggcgcggtgagacgttagataggtaggagaaggatggaggtaggaggacgagggggagggctcacagcggtaagaccagttccgatggcccagacgggctcgtaagcgatgacaatgtcgctacatcaacccaagtcgaggtcgatcagcattcccggttcaccactttgcgctcacgacgcctcgaccccacgcctgatgacgacccgacccacctccaagccttctcgtcgagaacgtcgacgacggactgcaactgcttctggttgacctcgtccgtcttctcagccttcctctcgtccaaagtctccccgatacagaggatgaccttcaacccggcctcgacggccgccttggtcttgtcggcgacaaactcgcacgtgtccccaaacatctgacgacgctcgctgtgcccgatgatcacccaggggatcttggcgtcgacgagttgcgcgggggcgatctcaccggtgaacgctccgcaggcggcggtgtgacagttctgggcagagatctggatgggaggttggacttcgtgcgaggcttgcaagaggtacaatgcgggaggagcgacaacgacctctgtcgggagagacacgtcgtgaggtgtgattcgtcagtcgggatgttgtcaccacctcgggatgagaacgagggtgccttcgggactcaccagtcttgccgtccaagttggcatcgttcatacccttgatcaagtccgagaccgacttgacggacccgttcatcttgaagttgcctccgacgaagaattgcctgttttcgttgaccatcttgagacgagttgtatgtgtgtgtattggggtctgagtacggggagtgcgttgagagttgatgacgaggtggtcgtttcaggcgaaagaatgagagatgagttggggatatcagtcttttgaatatagttcgggcggaatgttgtaggtgacgaggccgaatttcgacgtctttcaacccgaaaccgacccggtcgacctcgctcgacactcacatggtaatgtagttttgctgtatgcggaaagttccgggggtttcgacaaggtgagtttgagttgagagtagtgtaaagtcgttgatggtggtataacaacagttgaatgtatttcggcagttgacggagatagagccaagagagggaacggagcgcgagcaagagtggaaaaagggtggttcagttgcgggttttcgcggggaaaacgaacgaccgaccgtaccgacgacgataccgacctgatgtttgcagagaaagggacggagtggattgcgagtgcgagtgatcaggatgtaggtcgaaaatgatatgatatactacaactacacaactactgtcgatggtcgctccaccttgtctccgcaatcttgtttcgtgggaaaatcgtcgttccaagcgacaacaacccaacaatgacgtagatgacgacgtggacgtggacatggacgaccgattccatacacaaacactgctgctactgaacatgtacaacctcctagaccatccacccatcacttgttcttcctgccaccacccccacctcccccgccaaaacccacccaaccacgccctcgacaccgcttccccgcgcccagacgaaacacccttgatctccgcccgacatcataccaggaaagtccttcccgcggatggaccggcaagggaaaggtctaaaggcaggacgacggacgaaagaggcgcttgtcaggcagagggaggatgtcaaggggggaaagagagggcgagggggaaaggtgtatcggagtcctacatatgcttgtcttttctttgattttaggtattaatcattcgaggacccatccgagggagggtcgtccggaggtagaggagagaagagaggttgggggaagacgcggtatggtaggaagagggtgaagagccagttgatggagactcacaggtaagaaggcgatgtggttatgagagtccttgagcgtagaagagagaaaggaactagaggacgacgagagaagagaagatcttctaatcagccatctcgtcgacgaaaaagaacgcgcgcccgcgcgcgaaaaaaagtcgaaacgaatagaggtgtagagaaggggggttgtcataaatttgggtataattaatatgctgtcactgacgaatctccgtgtagcgattctgaaaacaaatgtttttataatcattcgaggtgggtcgagcctcggtagtgttgaggagtgggggagagcgtcctttccatccctcctcgcgcgttcgtgtcgccggggaggtaggtagaccggttcgagaggaaagaaaggtgtgatgctcacagtgtgggttgtgtgtgtgtattaagtttttcgttgatgtgtcgttggcgtggtcgtaaaagtgtgtttgaataagaggaaagtgggagtgcgacgaggtggagatagagcatgcgttgatgtcgctgctgttaacgctttttgtacaacgagggggaggaatagttgatgggggaaagtaggcaaaacgcgtgagaaagttgtagttagcactaggattaggcatgtatcacgtgatagtttgacgagatgacgttatagcacgcacaccatagcgttacttttacggcagggtcgcagcctgacatcacagcctgccttttccaagctgtcatgtttcgtttcgattgattacgtaattaacatgcccattccatttatcgcatcagcttgcaacttggggacctcgtcaaatagagttattcatcatcatcaaatgcaaccgcaaccacatcatcatcctatgaatgaccaccaccactccatactccccatgtcattcccaactcacaatcaagcaagacccatgcatacaccaccaccactccccttcaatcccaacgcccatcatttcaactcggccatgaacaacgtcgggttcgggttcggaggcgcggggggaagagggatgatgatcacctccccgccgtcgacacccatgccagcgacatcgtcatcgtcgtcgtcgtcgacgtcgacgtcgtttcaacaacagcagcagttacaccagcagtcacagggaatgggctttgcgaggttcggatcaggtggacaagccgcgggagggacggggttcggattcggattcggagtgggaggcgggagatcgaccttgtcgacatcaacaacaacaacaacgaacccagcaacatcatcatcatcatcatcggcatcgacatcgggatcgacatcgacatcgtcctttatcccccaatccctacatacacaccaaccccctcaacctcaagctcaaactcaaattcaaactcaagggcgtaatcacgatcccgagcatccccgcccggggttgtatcatcatcctacagccccgaacctcacgcctttaccttcaattacgtctgagctcgggtctacacacgcgggttcgacaacaacgggtgcggggacggggacgagagcgggtttggcgtcgatctcgatggtcggacgtcttgctggtcatcccccgacctcgaactcgaacctgaattcgatctcaggggcagggtcgacatcgaggaagaaacgtactcgctcgacatccccgaccaacgaccctgacggttacccggcgaccaccttacaggcggtcaaccagggtgcacagaggtcgacggggaaaagaagcagggaagagcctggttcgataggaagagaacggggtgggataaggggaggtgtggaggatcaggacgaggatgagctcgatgagctcgacgacgatcgagggacgaccagacgaagaaggacgagtgtggatgggccgaggggtaagaggatgaggagggatggatcgggcgatccggggaaaaagtcgggggcgaggagtaggagtcggatcgggttgttagggcagggtggagtgcaagaggagcgggatgagaacgacgacgatggtgacgacgatgatgatgaggatgagcaagcggaggatgaagaggacgtaggggtcttgctaggtacgttggcatgacaatccgttcttacagctagctacggatattgatgcaacccaccattacccgtttgaatctcacctgcacagcctccatccccacatcgtcactcctcccgctcatccattcgttgctccaagcccgaccttcccttaaatccctcttgacggaactcatccctacgcccgagatcgacgacgtcttgggggtcatcaaagatcgtgcaagaggcgtcgtaggcagtgtccctttgggcatggcagaggacggattggtaggcgtgagggtgaggacgagtttggcagagttttgcaaggccgtgagtcgatacccgaggtgggctcgtctgggcacgtagcgcggggctgacggttcgtaaattcgatcgcaggccatgacgtacctgccgaggttcatcatcgaggaaccttccatgggattcaggacgggacggaacgacaacacgacgaatttgacgaaggacgcaacgaggaatagaaatatcaacgatttgaacatgaccatgacgaccgacaacgacaatacgacaagaaacaacacgaccacgacgacgaccacgccacgacgattgccggttcacccgaccatcccaccgaccctcctggtacccctctcgcaaaccatcctgggcaccatcttccccgtcctcccatcccggctcttggtccacgaaaatacctcgttcgaccaactcgaagccttgtgcgacaaggttttgcgcgggtggacgacctgggtcaaggtactcggcaagacggtcaacgagcaaggaggcatgttcagctcgggcgtcgtcaaggcgtgggagaccgggttggacgagttggcgcagtatcacctgcaacgacagcaacaagtgcaacagcagcagcagcaacaacaattacagaccaaggaaaaatcaagaggaaagcaagagctgaccatcgccaacctcgagaaacgattcggcgaggggttgaaaacggtcagggacgaatgggtagatagcgtcgggtggatggtcgggaggagtcgaccagtggaagggttcgagggggccgcaggggaggatgtcaggatgggatgatcccctgcgcattatgacgggcaaggcaaagaaagccctggctcagacggacacacggccgatgtcaagtagacccgatcgatctcggttcgaaacttgtttggtgactgtatcgcattccacataaattcacgggtccagttctagcaatccatgattctactgcagagatccactcatccacgtgtgcgcggacgacggaatgccgtcgccgttggtaaccgcagcgatataatcgtcctggttctgcgagatgaccaccacggtacttgagctttgcgtgccatttggtgtggtcggcgagctttcctcatcagcagtactatgtaagacgcaaatgtcaatcagaatcgaaactcacagacgaatatcggtgctcactctcgatcgccaggttcgtcgctctgaggaaacgtgaagttaagtcaatcacgtccgggtgaatgaccttgcgcgtcttctgaggatcattccgagtcgccattggcggggacgaaacatttgacttcagggtcgctaccgggggagcatattgatcgcgaacttgggccgaacccgaagtcagctacgattgagcagagacccaatcgctttgaacgaacgagaagcgcttacccaggcggactttcagaagtctcgtttcatgcaatcgatgatgatcttgtatgcactgccggatatatcgggcgcggtttgatttggttctcccgaggattcgtcccgcagcggcaggcgaaagacaagccactttttccagaccgcttgatcttgcaatacgaactccggctcggctgatgaacaaaagaaatcatggcccgatccaatatcaacaaggctcatgtagaccgaatcgggaaatcctcgttgcgacaactagattataccacaaatttgccgttatatacccttgagatacaagcaagagggtatggacagcttactccgattggttccatcagtaggtttgcctatcactatgctgtatcgaatcagccagttccgagttgtatcattcaaggatactcacctcattgcccatggcaaaatcgaattccgttgaatcggctgggcgtcgcttcaggtttatagtgagaaaaaccagaagatgtcagcgaggtcctgctgaagggtatctgggcgacattgactgacttcgaagttttccttgaatccatacttgccatggtactcgttgtcattagcgatatgtgaagtgtacccctcctccgcctcgcaagcattcccattgaagccgtacttgtagtaacgaccgcttgaactcatcagccttctagcactcgtaaaagcaccctttttggccatgggctcacgctgtcttcttccaagtccaaaaaggcgtacggatcgccttttgatactggtagagcgtatattccctcgctgttcccgttgtcctggcagaccaaacgctcgacgttcgatgcgtagcagtgttgtgttcaaccaatgctaagcgcttatacaagcatacgagtacaccgcgacgagacaatcagcagttcgcgacattcctttctcccaaccgtttgatgtgcaattacgccatacaccacatgatgaccgatacatcctttgttatcatgtcgccatctttgtatctgctctagcctttcaccaactgcctaggtcgacccttggaatactgactgaatggcgcgattccccgcaggcgaatggtccggtgcaaaattgttcaaaaggtagaggtgaatattgcctgctccattgtcacgcctgacaagtagtcgtgcgactcccaactcgaagattcgacttttgggttaggggacaggctacttcataattgttccatccaggcccttctccatcacacgcaacccaacgcattctattctataaatcattcgacgtctacaagaaggggaccataacttttggctttcaggggatacattcgcgttcaaactgcgttgattcggtctcgtctagctaccggtgctacgggcttcggcagcagcgggcgcgggctgcttgtctgcatcggcacccttgcgctggattccagcgttgcgggacgcccaggtccagtccttgagatgaggactatgagcgaacgagctgcaattagccatctgtcgaccgatgccacgttgagtcaggtcaacagcacttacacatcgatacccttgtcgaacgcgtactcgacagccctgatctgctcgtccctgagcttgtcacggatggacgacccgcggttgttcaagttgggcatgcggtcgatggcctcgatggcgagactgaatcgatcggccttgttcttgatagcgagctcgagcggggtgtcaatgtttcccttttccctgtatccgcggacgtggatgttgcgggacccggcacgcctgtaggtgagtcggtggaccagccaggggtaggagtggaagttgacgatgataggcttgtcgcgggtaaagatgctatcaaactccttgtccgtcaggcctgatcgtcggaagcgaaaggttagctcatttttcgtgctcaacggttcgatcgcgactcgccatgaggatgatcctggtgtgagaccaaccggaacaggtcgacgacgttgacgaatcggatcttgataccgggcaagttctccttgagcaaggcagtggcggccaaagcttcggcggtgacgacgtcaccgataccacacatgacaatgtcgggctcctacagttggaaacgggttagtggaggacttcactctatgccgacaccgcactcaccgcgtcggggaaggtcgaagcccactcccaaatacccaatcccttggcacagtgagtcatggcgtcttccttgttcaagaactgcaaatgcggctgcttgtcgtaaacgatgcagttgacgtagtttttgctcttgaagcagtggtccatggtggacaacatggtgtttccgtcgggaggaaggtagatcctgacgacgtcgggactcttgttggtgagaacgtcgaggaaaccggggtcctggtgagtgaacccgttgtggtcctagcagtgcggggaccattgagcaagagcggcgttcctaaacatagccgaacagtacgtacctgacgccagaccgtgctagtcaacaggatgttcagcgacgatatctttttcctccattcgacctggttacacttttcaatccactttgagcggcaatgagggggtccgtcagcgagatcttcagcgaatttcatgctgcaccaccgcggctcaccttgcagtgctgtccaaccatcgagtctacgcacgggtcgagtcaagtcgtcagctgctgtgaatcacggcgagagtaggacgacccgacgctcaccgatgatatggatgaacggctcgtaactgttcaacaacccgtgcccaccggccaagatgtacccttccaaccacccctcgacggtgtgctcggacaacatctccatgaccctccccgtcgggctcaggttgccgccgtcctcgtcgtactcgatcgtatcggcgagccagacctttttcccggctttgtacacctcgccgagcttgttcgattccgtctcgtccggaccgaacagtcgaaagttggtcatgttggcggcgacgacgtctcggagccatttggcaaagttggccatgccgctctcgagtgtgacaccggggtcgacctggagagcatagtcttgccacttggggaggtccaagggcttgacggggtgtccaccgttggtcaccgggttggacgacattcgacggttcccctcgggcgcgagttcacggaggtcggcgatcaatcgaccgtctttgtcaaacacctcttcgggcttgtaactcttcatccactgttcgagctgtttcaagtgttcgtcggaatcggccacgtcggtgatgggtacctgatgggccctccagaacccttcgaggtgatgtccgcccacctcgctcggtccggtccagcccttgggggaacgcaggacgatcatcggccagcggggtcggaagggtttcccagagtctcgcgcttgcttctggtaagacctgatctcggtcacgcattgttcgagcgtggcggccatggcctggtgcatcgattcgaggtcggatccttcgacaaagtaaggcgtccatccgtaccctttgaagagcatctccagttcctcgtatgagacccgggcgaggacagtagggttgttgatcttgtacctgcggacgacgtgactcgatatcagtcacaaggccacgagcgatcagagacacccgctcgacgacacctacccgttcaagtgcaagacgggcaagacggcaccgtcggtcaccgggttcaggaacttgttaccatgccaagccgtggccaagggacccgtctcgctctccccatccccgaccatggtcaaggcgatcaaatcgggtcgatcgaatacggtcccaaaggcgtgtgagatcgagtaaccgagttcacctccctgcacacacacacacacacacacgggggcgagtatgtcagtcgatcgtccgtcgacgaaaccttcctccgccaacccgtcaggggaatcatgtaacccgacccacctcgtgtaaactccccgggacctcgggcgtagcatgactcccgttcccacccgggtgagaaaagtttctgaaaagcttttgcatacccgattcgtcctgggtgacttcggggtaacagtcggtgtacgacccttcgaggaaggagtgcgagattacaccgggggcgccgtgacctgtgggtccgagcgttacggggtaggagcgtgtcaaggggaacgtcggtggatgatggggcggtcgcggacggagaaaggatgggtatggggagaaaggttgatgatgatgtcacgtcgtcacgttgatgacgagagcagggtgagtgaacaagatcaaatcaccttgtcagcaaacgtttcgacctcgacctcgacatcgacatcgacgctcgtacggcgagacttaccaggacccgagatgaagaacgcattcaggtcgtactttttgatcaaccggttaaagtgcaaataggtaaacgattgacccggggcggatccaaagtgacccaacagcctggatttgaggtgagaggtggacaagggttctttgagcagagggtcccttttcaggtagatcatgctgtagtaggcgggcaaagcattgtaagagactgtcagtgtgaaatattcgggacgatgaggggacgagatggaccgacccgaggcagatgtaaagcgtggcattgaaatactgagtgtaccgcttgatttcttcgggcgacaagggagtcccctggacggtggacctcgccttgccgaaaggtgacaatgagctgaagtctgacatggtcacgatctggtcgttgatcgtgatgagagatcagagaagaggagtgtgtgtctggtttacgactaactgtctgccgttcctctatctcacactatatatacatacctttcccacgttgacagggaacgtcgtcatcacctcatggatatcgagattcgtcatcatctcgctgcagcgtcgttggctcggaaaatatcggttcggtggccgagaacgagaggattcggggaaaccgcttacggtgaccaccgcgacatccggcaccgtatggacacaccattcaagagagagagagagagagagagctcgaggagcagaacgggatggtctctatcctatcggagccgacagaacagattcgagaggacgtcgggtgatcgcgagagagtctctttgattcaccgggtcgacacggtcaacgaatgtccacgtggtacgcggccgggcacaggacgccgacctcaccccgcgagcgagcacagcgtcgagcggtcaatgtcggaggatcaaatgtggaaaacgagaaacacagcatgcacgtcaaggagtttagattgaagaacagaggcaaaatcggtggcttgagcttatactgcttcgtcaaacattgctcttacccaaagtgactttgtggtggttcttaaagtgacgagcttgttgtatggtctggcgataccgtgagatggcggtcgaaatgcaagacactcctcgcggcgtcaaaccgtaaacagagagtctactctttcctgcaatcacctgacataccctcctcgactctggtgtctctggtaaacacatccgcccggtcctgctacgtgcgctgcgagaaccttccaaagtcggccatcgtacatgccccggtttcatcctttgtcgacttgacacgggggacaaactcccccacagcgcttgcgcatccgggtgaagcagccgaggtcctactcacatcgagtctcacgtattggatcaactccaactcgtgaatggacggactcaccgatcgacgaccacagcctgtgccggacgggtcgaaccttcagctacaccttccctcatgatatgtatcgcagctctctttctctctgtggtcatgagtggaagcatgttcagagtcgcttcttttgaggctttgggcggtggaggagacggacccgaagattcgtcaaaggaccacgggtcgatgacggccggtgacgtaaagagaaggatttcggagctggggccgggtcgtgccatcttgtcagcgatcttatagccattcggtgcaatgtcatcgactgacagaacgagcgaggaccccggacaaggacaaggacgagtacgctggaccatgacccgtctctcgacacctgccgtgttcccggaactcggcgggcatagttatgcttgtttaactaccaccatccgacgtcgatatctcattattgttattggactgggtcgatgacggcgacgtggcgcgtcaaggtcgggcatcgtccgaatcaagtcgaggtcggaccgagttgactcgcaggactcgttcgaagggccggatccttccagcgtgactcgatcctttgtacctaaatacgagaaaggtttcgatcaggagactgtcagggatcactggcatgggcaaagaagtacataagattctgctttgagtagctttgtagatccgttatccaccaagtcacaacccgcgacccgtaactcgtcgattcaagatcgcggcaacaacaactcgaagcccgatcaccatgtccacctcgacgacccagccgatcatagagaccccgacacacatcgtccggagacacctccactcggacgcaggatccctcacccgatccctcgatgatcacgagatcacccgatggatgaccgataggatcgctttcccttacacgctcgacctcgcacacgaattcatccatcacctggattcccaacccgaaccccgtgtggatttcgtcgtcgtcgacaaaagcacgggggatgctgtaggaggcgtgggcctgaagatgaataccgacgtccatcgaaggacggtcgaactgggttattggctcgcaaggcagtcatggggacaagggatcatgtccaccctcgtcccccgattcctgaagtggacgttcgagcagtttccagaagtcaatagagtcgaagcgcaggtctttgaggggaacgaggcgagcaccaaggtcttggaaaagcaggggttcaggcaggaaggtgtattgagaggcaaggtgtggaaagagggcaaggtgatggatctgtacatattcgggttgctgcgggatgactttcaggtcggctccgggtgattcgggaatggcatcgcatgggaaacatagaaccgaaaacaagccgttcgggcgggtgcatgtttgtattggtagttgaaatcgtgcaggtgatgcacggagatggagtccccctccccacgtctatcacgatcccggtcgatcggacccccgctcagagttgtacgacggagccctaaactccgggcaactgaggatcgactttcccggagatacgatccaggacgatattcggggacggggacgtgctcgatgtcttgcctgcttatacgcctcgtcttcgtcgattgagctcgtgtgggacggggaggcacctgtgagtggcatgtactacgggggtcaggggattgcgggatcacgagtcagtcaaagcggttcacactgctagactggtcgatatgccctttccacctttccccgagttgttccgcttgtggatcgtgggttgtagcgtacgagttgtgggtggtgatcggttgttgtcgataccaagatgtctgtctgatgatcaaaaaggttgaaccttgcccctgtttctgattgacctcggtcttttcgttcaccgtcgtttgtctgtttcgtcatgctagccctcacttgaagcaacttgtatagcttgacatgtacaggtcttgtatatttcaatagcgtagcaacgtacaatctcaccagactcttccacttgaggagcgcttgtcaagaagggaatcagcttgatccctactttaccgcacagaccgtctggaagatgcggcggtcgaaacgcatcgcatcggggattcttctcgcaaccacaatgtcctcctcggtcatggccgtcagctcggtttctgcgtcgaccgtcaacgtctggttgagatcgaattgggatgcggcaccgttactactcgaagtcttgtaagtacaggccgtcatcccacaggaactacatcccccggcctgatgatgttgatgttgcacgccggtacggctttcacagggaaagcgccgcgctcgaggatccgacgatatactacccccttctctccctcttgacctcacacctccctctgttcgaaacatcatccacgaaagaacaattatcgaccatctacgatttggtcgcttcgtcgggcctcatccagcgacacccgatgtgggacctctcgtccttcaagacgtccctggccatgcacgaagcgtcacccaaggttcaggcgttttatcaatattacgattccgtcgtcgccgagaccgaactcggcagggggatcggaggagtatgcgagagctgggtcgaatggagggggaaaggcttctgtggggtggacgagctgaagagggatatggaactcacgttgagctcgaacgctaggtcggcctacccgttcccatctccaacgcctagcaaaggaatcacactgattcttaccctgaccatagcgcttccccgggtcaaaccgcaaagaccctaccgttcgaccacatctaccctcaagcttacatcgcatccccgcatccccccgcgatcctctatacacctaacctctcgtcaacccaggccgacctctacgaatacctgatgatgcacgccaaagcggacgagactttcgaagtgatcgtccgatacagacctgtccaatcgagcacgaaacaagaggacgagcgggatgcgaacaggaggaagaattcgttaaagggctatggggtggagatggtcctcaagaggacggattatctggccgtcgatgatagggataccgggcatgtcgagagtgagtcgagtccggtcgagttgagtcgatgaccccggcgcgggaggttgttaagtgctttgatgatccgatcgtagaccgccagcagcaaatctacgaggcgccggtggatcgggacaacggtactggagagcacggatacctcggcgtgatcgggcatgggtcatgggaagagttggtcagtaaacctctcaagctaggagagatcgcgggtcagtcgcgtccaccttcgacactgtcggatctcgacgttagctgatcaacctcctccctcacggcgacctaccgcccatagacctcggcttgaagacggcctcgttgatcatgtccgacccgaaccccctctcggcgctgatcggcatctcgcaagactttccgaaacactcggccagtatcgcgcgcaaagtcaagtcggacgaatggatcgaacgcgaggtcgccatcaatcaggcaaaggccgacgtcaagagcgcgttctgggtcaacgggaggatcgtcacggacaaggagctagatgcgttcaggcgagtctgacgtcgtgtgctcgtaggtatgtcgtcgatactgacaagacggcccgtcctccagcttgttgtcgatcatgaggcaggagaggcaacggatgatggcattgacgtcgcttggcctgaccccggaacaggctttcaacttgctcaccgacgaggatatcgtcacggccatgaccgaacccgagcccatgatgggaatcgtcgacgccggtgacaagctcgagggaggtagagtgatcacctggtggaacgatatcgaaaaggacaagcggtgagaagccggcatgcaacatgcccacgacatactgtttgcatattgaacggccactttgcgatccaggtatgcgagttggccgagctccatccccgcggtaagtttccgaaccctcgagatctcgactcgaacatccaccgacgtccttgttcttggcagctcgtccgacccggtcgacaaggtccgttcaaccaggtcaagcgaaacttttggcacgtcatcctcgtcatggacatgtccaagagtttctccttgagcaccatctcgcagacggctcagcagatgatcaagcgggggatacctttccggatcggactggttccattgatcacggatagcaatgacgatatgagtgggtgggataggtctggagcgtcttgtcggtgtgccggatctcatcccatcacgatcgcataggcataaaaatggctagactgttcgactacctcattcgcaagaacggcagggccgaagccatggagtttatgcacacagtaagcatcagctcgcgttgagcctcgcgcgtcaccttgactgacagccgggtcccgcagctctggagagcgtcacctcggggtgaagtcatgctcaacatcgccgaaagcctatacccgggtgatggtgacgactcgttctcagacgttgtcgaaggcaaggtcggaaacttgcccacagacaaaatccgcgcgtggttatcgaggacggccgtcaactcccagaacagtcctcgaggcgccgtcttcttcaacgggcagtaccagcccttggacgaggtcagtcgatcgagacatgtcgaagcaaaacctggtgctcacgtccgcccttcgacgtcgcagcgctggactgaccgcatcatgcaggattacatgggtcagctgaattatctgatgcagccagcaagtcagaccggactactaggcgcctgaaattaaattgactgacgaatcatcacgacagggcgttctgaatgaactaaaggccgcgccacgtctcgatcgtttcttctacgaattgcccacaacatcttcccgaaggaatatacacgtgcctgctggcgagccgattggctcccaaaccatcgtagatccacgtcgctcgttcgggcccaactcgttggtcttggatcagcatgtctaccctggtgcgtgccacgatcgcgtacgagattcccgctcgagcctcgtctgatttcgctccaatctcagatgaagatagcgacaacgtactggtgacgttccacgtgctgggcgatctcgatagccagtcgggtaggctgatggcgcgcagagcgctcgaattcctgcaggtaaagcctgggaattgctgtatgccgggtcgtaagctaatccaaatatggcgaccgatatagcgcaagggccggcacacgagactcggcttcatccacattccatcagagaccagtcaacatcacaagggcccacgcctatcgaccgtgctttaccaagcattgtcttcccagactttgtcaaaattctcggccgcgagcttgatcgagatgctcgatgaactagatgcggtcgatcaaggcgtccagatgggcgagatcgaggacagcgctagaacggcaactgcggaaggcgtctctggattgctcgccctgccctcacccatcacgctagctgccgccaggactttttgggacgagcgagcttcagaagcccgtacgctgcctgtagctggacagggcacctttgttatgatgaacggaagagttagtctactcatcgtcatgcgtggtcgctcatgctatgtgactgatatgcttgactgacagatcatcggaccactcccacccaacgaattcttcgccgacgactttttcaccttggcgatgggcgacgtccgaagtcgcggaatgcctattctagaggcgctaaaggggatataccacgatgttggcgcgctggaaaggttagtcgatgcgtcggcgtcacggttgacaccacgtcagctgatctgccatcacctccatcagctctacgctgagcaatctggtctgtggaattgcggccatactcggcgaggcgttctcgagcgataattcttctccgcaacaatccgctgtggttgcccggacgcgtggttacaccgaggtgactggtcaaaagtccagcttcacgatcaagcagactccagccggcctgatcaggattttcgcgattatcgatcccgtcagtgaacaagctcagaaatggtcgtcgctgattcaggtaagtcgccttttggtcaccggcttgaacgccttcgctcagtgttggacccaatgcatagatggctaccgacctggatcatgtctcagcggtcgtccagcttaaccctgttatagcacttgccgatgtgggtctcgataaatccgtctcgtattacctggttttgactttgatgcttttcgcagatcccggtcaagcgattctatcgatacgaggcggtcagcgatatgcgttacaatgccgaggggtaagcgtgcgatctcgatcgcgtgtaactggtaaaagctgatgcatgcgagtctcacaggggcgaggcgatgacgggagtcagcttccgcggattgccagaggatcccattcttaccctgggattggacattcctacgtcttggctagttcgacccaaggaatcaattcatgacttggacaatctgcgactggagagtattctggccaagcagcagtctcctgtggtcgacattcgattcgagctggagcagctcgtcatagaaggccatggcagggagttgagggcatcggtaccacggggcttgcaattgcagctggcgacgaccgagggagacgttatcggcgatacctcgatcatggcgaacctaggctacttccaattcaaggcggagcctggcctttacaacctcaacatacgggatggccgaggccgtgacgtctatagcttacacagcttgtcatccggaactgcctcttcgggtcgacctacttccgagatcgccttgacctcgttcaccgggttgacggtcaggcccgtctttgagcgaaaacctggaatggaacttgccgatgtgctcgaggaggtgattcctcggcccggtttctttgacaagctctattcgtcgtgagtgcatgaccgggccgttgtgaataacgtcgtcgaccgtgatctgatctcgatcattcagtctatctaccgtcctcggtcgcaagaacccaccggcacgtccacaggccgagatcaacatcttcactgtcgcctcgggcaaattgtacgaacggttcgcgtcgatcatggtgctcagcgtgttgaagcacacgcaaagtaccgtcaaattctggttcatcgagaatttcttgtctccatcgttcctggagttcttgccgctgtttgccaaggaatacggattcgagtacgaactggtcacttatcgctggccttcgtggcttcgcgcacagagggagaagcaacgagagatttggggttacaagatcctcttcctcgacgtcttgttcccgctcagcctggacaaggtcatctttgtcgacgcggatcagatcgtccggaccgacttgaaggaactggtcgatgtggatctgcagggcaaggtttacgggtacgcaccgatgggggacgacaagcccgagatggaagggttccggttctggaagacgggatactggaaagacgcgctccgagggagaccttatcatatcagtgcgctctacgtggtagatctcaagcggttccgacagctggctgctggggatcggttgagagcgtcttaccaagcgttgtcggcggatccggggtcgttggccaacttggatcaagatctgccgaattcgatgcaggatcaattgccgatccatacgctggatcgatcgtggttgtggtgcgagacttggtgcagtcaagacagcttgaaggacgccaagacgagtgagtcgcgcagtgatgctacccctacccccgggcggaaattcgactaacttgccgttcggtcccccgcttcgcggttgcagtcgatctgtgtcagaatcccctaacgaaacaacccaaactggaacgagcgaaagagattcccgaatgggagacgtacgaccgcgaggtggacgagtttgcgagacgactcatcgagcggagtgatgaacaggtcgaggtggtcactggctcggcagaagcgctcgtgccggacgattcggcctcgatgacggatcatgacgacaaacagcacttgcatgcaggacagcggattgtagatgatctatagaagaggtagatgcagggtctagatggcccatcccatcccatctcccgatgaaacgacgtgttagcatttgaatttgtttccgaaatttccaaattagattccgcaaaaacctagaatttcttgaaatttcaagagttgagaactgcagtagtttgcgaattcatcgtcgtcaccatatcatcgggtatcatctacatcgatcgactctgctggacctaccgctgtaataacaacgactctcaacctacaagtcgatgctcatatcctcttcgaatctcctccgtatattgatcgctacaactccgactcccgccttactcgcaacctcccgaatcgccatgtcgcaacctcaaccccgtcaatcccgtggccgcggtggtggtgccgctcgatcgcagcaatccaccagacccaagacgaccactgctaccgccatgccgaccgaatctgcgccccgacaagacttgaccgaggtcgcacctaccgtctctacccacttgtcgaccgtgccctttgccagcctgagcgacagggtcgatcccaggttgctctcggccattcctttccccttgatgagcgaagtccaggcggcgaccttggggcccgctttgacgggtgccgatttgctcgcaagggccaagacgggaaccggaaagaccatcgctttcttgctccccaccctcaacaggatccttcaacaaaagcctcgagcgggatccgacaagattagctgtctgatcatgtcgcccacccgagaactcgctcttcaaatcgaaaaggagaccgagatgctgttgaaaaacgtcggagggaccgtcggtgtacagcacgtcgtaggaggaaccaacatgaaggccgaggcaaagaggttggcttctcaacgatgcgacgtcctgatcgccacgcccggtcgattgctcgatcaccttaccaacagcaacggagtcgcacaaaagttttccaacttgcaagcctacatcctggacgaggcggacaggatgctggacatgggattcaggcaggaactcgccaagattagcaaattcttgccggaccgaaagagcgtccccaggcaggccttgttgttcagcgccacgatcccggacggtgtcagagaggtggccgatctcgacaagaacgccgtctacgtcaacacggtcagcgaggaggaagacaacacgcacgcccacgtcgctcaaaagtcggtcatcgcgcccaagtcggccgatatctatcccatgaccttggctctcctcatgcaagagctcgagagggctcccacgaccgccaaggtgatcgtctttgcgcccaccgctagggccgccggtttggccgccgagctattcaggagcaaggccatcggcgccttgctgcaagacggcaacggctcgttttcgatcggcgaagtccattcccgtaaatcccaagcccagcgcgtcaaggcgacccaggagtttgcccaggcccgtcgtgggatcttgttctcgtccgacgtcgccgctcgtgggatcgatttcccaggcgtcacggccgtcttccaagccggtctccccgccagctcggaccagtacgtccaccgaatcggaaggaccggacgagccggtgcagagggtcacagtatcatcatcctctcgtcgtgggaatcttactttttgaacggcaaagacatgcgggaactacccatcagcccttaccctcaactccccgcggacctattgtcccgatgcagggcggccgtcacccggggtatgctggacgatgtcacggacgagagcaaagctcaggcctaccaagcctcccttgggtactataagagcgagctcaggagtctcagatggagcgtggatcagctcgtccaccacatgaacgagtacgccagcgaggccctgttatacgccggcggtgggggtgcttcgtctcctcccttgctcgccaagacggtcggcaagatgggactcaagggaactcctggcttgaacattgtccgggaattgccaggtggcgcgggacaaagtcagggacgcggtggtcagggtcaagcacgaggaggtggtcaatcgcggggtcccgctcggggtggaccccaaggaatgcccgagtcgagagggatccctcagggtcacgttcccggtcaatcgggtggtcgaggcaggggaagcgggaggggacgaggtggaagcaggggcggtcgaggtggggtttcgaacgtcgcatagacccagttccgtgttctagatgggttcggtctctggtcccgactttttacgactttttctcgactcgtttgtagctagaaactccatcatataggctttggccgtgctgtagcaccatagttggcatacccatccgaatagaagcatcaattgaatcgcgctcaccctcggatgtctcgatcgtgcgactttcatacgataatcaatgcgaaggtcgaggtctacttacagccgaatgatatggggcaaatcccaaggtaagacagcagaccgactttcggtcgctcttgtaattgttccatcaattgtcaaacttccgatcggtcgtacgacacgttcgacagatatatgcctgacagccgaatgtgcttgcgttatcgcgttcggcattatcgtggccaaaggtgcaccaacgtgtcatatgaaacacttgaggacgcgcgtttgcttcagcttcggcccatgcatgcatggtaggtggccaagacagggagactatcgatgacgttagatcgaggtcctgttggagaaaatggaggacctgccgtgctccatgtcacggcgccgccgtcagattgcaagctacatcaagccattatcattaaaagcgctatgacaccaatcggtagcttgggagcgtatctcgccccttggaaaatcagccacggctcctcacagctaatgctcgtcatcgccatgcttaaggctttataattctgttcgtcagctatggtacacatcgagtctaccccaactgataaagcacgggatcgtaaaataggagatggacttgtcccgtggacgatgatcgaagacgtagaaaagtcttgcacggtcggtcgtgttctgcgtgacctgttcatcatccgaggtttcgaagagctgacgcagatatcattattctttgtcgaagtacgtcaaagccgatggaatcaaggaaggtagagcattcggcttgacgagtttctcgacggagggcgcgtgcggttcccagcagatcacgatggggatgcgaaggcaccctcatggaggatcccaacggctccccatagccctgcctatcgctgtgaggttctcgtgtggacaagctgcctgcagcggctgttaggatggcattgacccagatcatcgtgtctttgacgggcatgatctagtacgaatacttgtcggaacacgaggaatctgattcggaccatctagacacggtcttcaacaagaagatttgcatcaatctctatccatctatatcattcaacctcgacgaatccaatgcaaccctacacatcatgtctggctcaagatatcagcaaaaattccactatcaaaccccttccgggtcaatcatcgtcgcccctgcctccttacacatatcacccaaggcaggttcattgtcctctacggccatcgacttggccgcacgacctaccaaccaacaagaagaggaaacttgtaaaggacaactcgactgagtcggtagagccaggagagccagcagtcaacactccaacccccttgcctggaaggtcacagagagatttgcccaaggtctcagctgctggtgaacataggtgaggagtgtgcgtgcagggttattgatggtgatcggtggcagcaaagtaactacatcctcaaatatagtactctgcgataccagtctgctcaacaccgtccttgagtaaggagttatctccatcatgtccaagcagcaaatcctcctcagtgttgctagcctcctcgagctccgtcacgaccatcctctccacgtcgagctccgccaaatcgatgcttgtcaactacgccagttagggcaatgtcaaagcggtcaagagaaaggcctcagcaatgaagacgacgggaaccacggggacgacggggttgcagatggacgaggacgaggtgtcagtgccggtgccatcaaaaggcaacgcggtgacacccaacagcgcagtgcccccaaataagcccaagtcttcggtcacacaatcgagctgtgaatgaatgatgcttcatgtttgagacgtgtttcggtatgacgagaccatttgcaaacgaccatcctcgaaatcctcttgtaatacatcgttatgatcttacgacaattgcgaagcgagttgtcccagtcgttcagccatttggggatagttctgtagtgagagcgacgcgtgagctggggaggacaaccgaggtgaagacagtgagactcacctgcaagaaggcgagttgcgctcgggacgcatgttcgtctgaatgggacaaggagaaaaggtcagctgagtgacgtttacgtttcgtgtcggagatgacggctcacaagtgatggcggtggtaagttcgacttcggttcgggccagcttggcgctcttttcgaaccagtcgatggcttccgagatcttgccctgctgcaagctgagctgagcgagcgtagcgacggcgacgtcgcagtcggggtcgatatcgagggcctctttgcagaggtcttcggcctgttgcatgtcctgcttccactggaagacaccgagcgccttgttgacccaaggaaggacgttcttgacacgaccggacctggcgagatggaggcagggagatgagtacggtgatactcgattccgccagcaggccactatttaagctcacttctcgctctcttgagccatggccaagctgaactggttgacagcatcttcgaatcgctgctgatccaacaaaagctctccgctaagaagacgcgttgtgagctcagcccgccattcaagggtttcgccggtcccgatcgcctagcttactagtagttgaaaggctcggacctctgggggaagtccttgagaatctttcggaaagcgaccatgctctccctgatcttgccgaccttgtactcgcagacggccttttggacgtgggaaaagacaaagtccttgtcgagctcggtcgacttgtcgtaatcggccgacgccttggcgtactcggacgtgataaagtagactgagcgatgtgaagccaaacgtcagccaagcttgttaagaagaggaattgccgcgagccatcagtcgcgactcacgctgtcctcgatggtagtaaatgtcgggatcgttggggttgtgtcggatggcagcttcaaagtcaccaaaggcgccggcagcgtcacccatctccatgtgtacactggccaccttgaccaagctctgcacgtagtcgggtttgaggtccagactcttttcaaagtcggccttggcgccgaccgcgtcgccgagcacgaacctgaggcgggaaaggggcgaaaaaagccaatactggatgagcgaacgcggttctcgtttcgaaacatgtcgagactagccccgagacccacttgtatgttcctcgcatgttgtaggcaaacgcctgaccatcggtccaatcggcgctaacgccctgttcgatggcttcgttgacgagcatgaaggctcgggtgtaatcacctgcaccttcagcctcggtggccatcttgagggtgttgttgcccgtgttgaccgagtccgacggcaggacgggaggggtcaatgccggttctagatgagtcaagggtttggtcagcctctccggcttgatcggctgtgggcccagtacaaaaagaccgggaccgggaccgggacggggactcacgaggcctgaacgcgccgaggtaactcgacacaaaggtggtgctgggcaacttgggttcccgggtcttcatgatctcttctgcctttttcgccgaaatctttttcaacacccgttcgacactctcgctcgcgctggcgttttggaatcgctccatgatcgtcgtcgcggtgaagtctgtacggggtcagcgaaaaaggacaaatgaaggggcaaggttggcgtcgtctcgaggatcagtgtcgaaactcgagtcactgacctcggagagcttcttcgtcccgaccgaggttctcgaacgcggtagcacgtcggttcaacgccttgacgctgataggggcgaaggatttaaataccgatcagcagcagctccgacactccagattgcatggtgaaatcttctcttcccgagtcgtgcgacttactaagccgggtcgagcttgagcgcgtcgttgcaatcctcgagcaccttttcgtaccgaggagggctcatgttctgccagcctgtcgagtaggaaacgaaatcgatcgccctcgggaggatcagcatccgtgcgatgaggctgatcgggccggcgggcttacatgcggcacggttcgagtagtagactgcctcttcgacatcggcgacgtcgagcgcgtgagtgtagctagacagaagaaaacgacagaggtcgagagcgtgagacacggagggcggggaaaagtcgaggtagcatgaccctgactgaccaggcggcggcgtcttcaaagtgtttctgagcgtacagcttgttacccctgttcttgagcatcgtagcgaatttcttgcgctcctacagagtgggggaaacgatcgaggtgggcgagcgaataccgaggcagacgtatcaaggtcaggtcgttttcagtcgacacgagaatcgcccgcggtatgacggctcacctcggcggtctggctcgagagttgagacttttcgggaatgccttcgaggtagctaggtcgttcggagtcttccgttacattgctcttggccggggtgtcggtcgtgttagtggcggtcggttcctcggcccgcttggtctcttgcaaccgcttgacctcttccgggtctcgttcctccaacagaggactctggtcggacggggtcttgcccgcaccggtcttcttggacttggactttttcttcttcttcttttgctgcgaggtggccccacccgtagcgttcgtccgggaaacgtcctcgtcggaactgctctcgccgctcttttccttgcgtccagcgtggggttcgacggcacgcggttggttggcgtagaggtagtatcccattccaccggcagcgacgacggcggcaccgagaacgaggtacttgttctcctctacccatcgtgtcgtacggttgacgagcgagttgggaggtgcgaccgaagaggtcgggggcatgctcgatacggggatcgaggctggaggtgcgacgggaacgaggggagggggtgccatcgtcggggaaattagtcagtgtcaaagtggggatgactaggtactagtataacctgaagaggggtatcagtgcttgaatatggcagtatagcatgaggtatagttacattattgcatgggttgaacccccaagcaaccccctactcgattcgtggttcggtcgacttttggtcgcgtttctcaagttctcacgaggggaaaagcggggaaaatgatgtcatgggtggtggaaatcatcatgggatcacggttctcacctataacttgcatgtatacagtctgatagtagatcacctggtcaggattcaaaaattatctcggtcaagctcgtcgaaaaaagaaaggaaaacggacgatcgagtgaaaccggatcggacctcgagacacggatatcaagaggacacgtcgagccagatctcaaacatgaactcgagcttgtcattctacatgctacgtcaaacgatctcggcagtacccggaccatcccgtttgctcctcaggggagtacactcgacgtcgatccgatggtcgggacacaaccgagtgagtctggacagacctgacggcccgacctcttgaaacgtcgttgacggatctctgtgccgggtgtcgtaccggtttggtatcgtgcgcagtggtccaagattcgacatcgaaagggagcggcggattcggccaagtcgacccagttttccaagatcacgaacgtcagtatacgactctccccgaattcgtcgtggtcatgtcacaagctgaaactttggctccaacgcccttccctctgcgaacatgaatgcatgacacaaacgatgaaatccactacggcgtacaccctaccaccatgccgacccaaacccgacggagaacaggagatttacatgtcactccgacctccagcctcacccgacccagccctgaacccaaggttatctgcaatcctcgccaaggcgagagaggtcggctatccgaagagtaatgtggatacagccatgaacaaggtgaggctcgagcgtgcgtccgaggtcgacctgggggacgaggacggggtcggggtcaccgtaaggtcactcgtaagaggctcgagaagcttcttagccagatcgggacctcggaccgaaccaagacgggacacaacgaaccgaaccgagacgaacccccgtgctgaaccctacgttcgacctggtgctccctgcaggccctgaatccacacgaaggtgcggctctgcagagtataacgtacgaagccgtcggaccgggcggacaggtcgggttgatcatgtacgtgagtcggtatgagaggatgtcggggtcgtatcggcgccttcaagaaggccaggggttccggatagggtcctagggtggatcgaggattgaattgtcggttgacaatgcaatgtgattcgaatcgatagcgagtgtttaacggataacgccaatcgatgcgtctcgagggtcaaggaacagttgaacaagtatgggtaggtccgagatgcttccgtccgtccatccgcacgtcaacatcgatcgagctgctgatcgagcgacgtggacgtgatcgtcaacgtcgacgtcgatagcggccggatgtcacccacggcgtttttgttcgagcgtaaaggcgtgatcgggctcgtcctcggcccagaagagacgaccaagaaggacgcggcgttcgatatgctgttcgaactcgctgtggaagctggggcagaggacgtcagggtggtcgaaccgacggaagatgatcaggcgggcggattcgaggtgagtcgaaagacgtcgcggatcgcctgtacgtgcgctgaccaagaacgatcacgtcgacgacccaggtggtcacgccacccgcagaggtgactaccattgccagtgccatgacgaaacctttcattgtgactggggttcaggtggcatacctcgccttgacgcccttgcgcttgcctgctgacgaggatgatcagcagagcgacgacgaggtgattggcgatgacgtggctgaaaaggtgtttagcctggtggatggacttgaagagactggtgatgtcgtcaaggtgtggaccaacgtcacaggtgtatgacaacacgaccgacaaccatgatggatgatgacagatgatgacaatcgatttaataatatcaatgatggatggatgttacatgtatgaaaccaactacccacccaccctgtttccctgccttttaccaaataaaagcgcaccatttctagttttcaacaagcgcgctagtcaaccctgcaactctggtttgacacgttggagccagcaatcgactgatcatggacaacatcatcaacctctcgtcacgacaatgtcactcgactactcttttcctgtcaagcagttcatcccatagtaggtcatagaacacagcagtatatcctctgtggaaataacgcgctaattccagttggaaacctcccccggattcacagaagaaaaactactcttcacacaaaaatgtctaccgaacaaacctacatcatggtcaaggtgagtcacgcccgcacacccccaccgatccaggctactagtacgagacgaatatacgatgctgatcagtcgtaaccgattcgcccacagcctgacggtgtccagcgaggactcgtcggtgacatcatctcccgattcgagaagaggggttacaaggtacgtccccccctcgcccgcacagaggcttcttcctcccacccatgcatgcccacactgacacgcctgcccccgttttctctcttgccagctcgtcggattgaagatggccacccccggcaaggagcacctcgagaagcactacgccgacttgtcttccaaggcctttttccccggtctcatcagctacatgaactcgggacccgtcgtcgggatggtctgggagggacgtgatgccgtcaagtgagtcgaggcagggcggcgcggggtgatgcgcgaggcgaggccagtcgcacagtatctgaacacgcccgtctatccgcgtcttttttctccgtgtcctgccatcacgtcaacttcaaccccgaccccgacttggccccgcacaggaccggccgagtcatgctcggtgccaccgaccccctcaagtcggaccccggttcgatccgaggtgcctacgccctcgaagtcggtcgaaacgtctgccacggttccgacacggtcgagaacgctcaaaaggagatcaagctctggttccccgagggtatcaactcgtggacctcggccgcttacaactgggtttacgaaaagtagacggaatgcgtcctcgtccccgggaaacgtcgtcagctttcgttagagtacatgccctcggtccgtatcgatgcaggtcaattcggcttgtaatctcgattcgtgatcaatgacatgatttcgtagcatcgacgtgcggcgtgcattcgtgtggttactacaaccgtcattgctagcccgacgtcccttttcgtcgcgcatcgcgcctctgctggcgatcaaatgtcctcgtcaatgtcactgttcatgagctcggccaactcgcgctcctcttcctcggtcatcagactcgacttggtctcgaccacttcctcttttgggatcgcgggtggtgtcaacacgtctgaccagcgagagcgagaggcagatggtgtcagtgtctctacaacaagccgaaaccgacactgacaacggcggcaacccctaccttgcatactccatcttcgtaacgtctcgtccagactcgcgctgaccacccaagcttcctttttgcccccctcgacctctttgacccagacgtcgaggtcgacaacatcagcccagtgaccctcgattcgggagacttgtctcgcacgtcctcgaccgggatcgagcttgatctgttccgacgagtacgatcgcgaggcaaggtccgtcgtcgagctgatgtcaaacacacggatggactggtccgatgcgccgcagaggagcagaggggtcgagtggaacgtcgaaggcaagaggaggagcgagcggatggacgtggattccccgtacaacggctcggggatcgtcaacgccggtttacgactcgtctgaccgtccataccgcccgtctccccgtcgagcggatggtacaagacttgcgagtccatcgaacacgagatcaacccgacgtccccatccatgatcaaccgggtgatgctcgtgtgatgtccagggaaatctcggccctgtaccacttgcaccaccgacgcctcggggtcggatggacgggtgaatgaccaggttcggatgacacccatagagtcccccgcgtagacggtcgcttggcgggtccgttcgtccgcccgggcgagcacgaacgagtctacaggtcgggtgtgagatttgagttgatgtatgcgttgcaaggggaggtcgcacgtggtggacaagccggataatgaccagacggcgatggtcttgtcggaagaacccgagaggacgagatcgagctgagggatgacgagcagggatttgacgaaatccgtatgagccggtgtcgagctcaatagttgacccgtctgaagatcgggtcgacattcaacacacacatcagctcgacataggcagcgctcgcgacagggctcggactgacctcgacgtcccacaccttgatcgtcttgtcccatgatcccgtcaccatcagatctcgcccatgtgccccagctccgactcgataaaagtccaacgaggtacatggaccttgatgacctttgtagacccgtttcgtcttgcccgtctgacgagcgtcatatggggacggatcggtcagacgtcctcgtcgcccggatcggactgggcactcacatgcaagcatacccgcctgaccacccatccgctttcagcaacccatgcatcctgaccccggaccttcaacttgatggccctgctcggtagctggatgggcgccccgatcgtcttggtcaacacggcctttcgagcctgagcttccttttgagccagctgagcgtccgtctggaacaacttggattcgtccgacgtgttcatggtggggtgtccggttcgaggtgcggatgtggtgcagaggagttaccgaagagtctctaggagtgcgaccggggtcactttgagtgtcgtatagacatgggatgatgttcgtagacatatacacatgacttgcaccaagtttcaattttggatttaccgagctttctcccgcgggcgacttggctagggaaggggaaagtgctcgaccttgactatacaaccacattcaactattcaacgacgacgacgaccacacactccacaggccacccccgaatcacaccaagatgacctcttctaacaagctgcccccgttcctcgatgcgaatcgcctgctatcggtacagagtcacgtcgtctctggctatgtcggcgagtcctatctgggacgtcggccatctcctactctgtcgctgatcgtcgtcgtcatcatcatatcttctgtcgatcaggcaaccgtgcggcgacttttcccctgcaattgctagggtacgacgtcgatgtagtcaacactgtacaattcagtaatcataccggtgagacgacgatggctggcgcacgagcgggttctcgacccatggcttaaacgtcccgaacgtcgactttcagggtatggacataccaacggtcacaagaccaccccggaacaactcgacgccgtattcaaggggctcgagacgaatgggttatgtaggtggtcgagatgtttgacgggtgagtctcaagtctagaagtgggcactcgtcggttctgatacgaaacatgggctcatgacgtgaacgggttttgcgtcgtgcaggctacatcccgggagctcccgctgtacaggctgtaggacacgagattgaaaagcttaaacgaagagctcaagctcagggagaggacgtcctctatcttctggaccgtacgtaccgaactccgactctgttggagggaactctacggcatcgcatgcggcgctgacgtcggagtcgactcggtggttggtccattcgcagccgtcatgggggatatcggcaagggactctacgtggccgaggacgtggtacccatctatcgacagcttttgagtctggcgagtatcatcacgcccaatcagttcgaaaccgagtacgtccccgcacccccccgcccttggtcccatggcatggctaccaggctgaccccggtgaaacctgcacgggcaggctcttgtcagagaccaagatcgattcgatccccgcgctgtacaaggcgctgatgacgctccattccccgccacacaacgtccaacacgtcgtcatctcctcgatccccctcccgatcggcttgatccggaaactagatctccccatggcacccgaatcgtacacctcattcttgccgggtaacgccactaccgacaccccggcgtcggcggggcctagtcggacgggatcgacggcgtcgctcgattcccagaggcatgcgtttgacgagaaagtgtcgggtgggatcaggatgtttcatgaacagggggacgagggggacgaaccgaccgtcttggtttgtttcgcgtcgacacgacggggtgggagagacgacgaccgcgaagaaaatggcgacgggctagagacgtacgggtacgctttgccaacggtacaagggtactactcgggagtaggcgatctgttctcggccctcgtcttgggtcattaccagcgcgagccgtcgtcgtcatcgtcgacggggggattggaacgggccgtctcgctcgctctcctcggggtacagcaggtcttgctcaagacgcacctgtccaccctgtcgaacaaaactggagggaccaagaccgctcgggagtcgaacggcgagactgaatgtataccttcggacgacgagttggatgccgagggcgcctcgtcgtcgtcggcaaacaaggacgcacagccgggtccttcgagacgggcgaggaggatgaggttgcgcgagttgaggatcgtacaagaacgaaatctcttgatgcggttggcggatgacgccgagggtgggtggaagggagctaggttggattggcaggctttgttacaggagggacgggagtgaggatgcggggtgaggtagggcggtgaggagggtggtttgattcccgcagtcattttgggacgtccacaatcgactccaggcgacgggctacatcggcgcatgcggtgtccgtcatgagaccatgaaagccatcctgcagatccgtagaacatgctcttctcgtcgtcatcgtcgtcgtcgttgccatggccatgatcatgttccccaacaggttgcctgggtggagtctgtgtgtttttcggttccgagatgtttctcgcgggaattgttttgcggggacaagcacgtgaatagcagcaaagcagcgacaggcgagcatcatgcttggggtcatctagatcattgtgtcatcgtctactcttcccgagtgacagtgtagccgatagtcaagagagagctcgagagtgagaagacactgtaacacccggttctgttcacatcgatccggctgtcaaaccagcaacaagtagtgcattcgcggacgcttgcgcggacgacgtcgtcgctcaacacaaggtggtcccactctatccgccgccttcgataacatatcaatcggtctcctttatactcctctcccgtcccacacacgccacggctagcatattctaccaaggtcgtcaatagtcgcagagaccgagttacgatagacacacgagcaggaacgtatcgacaccatcgatcaacaaggtgagtcgcgaaataccgactgataacgaacgaacgaacgcaagtctgatcacttcggtcccgccccggcagccacatatcctgcaatctcacccaccatgtccgactttgccagctcgtcgtcgagctacctcgctacgccggccaccacacgcagtcgatccatctcccaaccacaacaacatcgacccttgcaacactcgccttccggttcccccagccacttgcaccaatccccgatgatgaacctctcgacgtccccttccgccccagcgaggatgcatcaacgtagtctctcccgctccttgtcaaacaatgccattcaaaaggtaaactcgtccggcctgggactggcctttgacacctcgcccagtcacggtcatcatcacctccacatgcacaatcccgatggcacgaccctccaatcaggcagcttgggacccgcaggtggcacagcagaggcgaaaaagggtagaggtaggagttcgagcttggtcaccgtgaccgaagtcggcgcagaggatggtgatcaggtcgtcgatcgtctcggcgtcggtgtcaacgagaacgcaaactgggtcaacgccccaggtgagtcggagcgtcgggcacaacgggtcgacaggctcgagctagaaacggccagtcggagctgatcacgggttcgctccctcgtaggtgcctggttgatccacccggtcatcatcctcctcggcaaggtgctcgtcgacgctatacccaacatgacggcgagttatagctggacgatcgtcaacctcggatacgtcatggtgcgtccgccgtgacagtgtcatcaagctggaggagtcgaggcgagtcggctaatatgaccgcgcctgaacaggcttcgtacacaatgttccattcggtcacgggcgtccctttcgaatcctcgtgagtcgacgacgacgtcgcatcaggtctcgactgatttcggaccgcgtctgacatccgacgttcgacaccctcgcaggcaaccttcgggaggagcctacgatgatctcaccttgtgggaacagatcgacgccggtgctcagtacacgccggcgaaaaagtggttgaccagcgtgcccatctttttgtgagtcacggcgagggtcaaactcgtggaagcctcgtcgagcctgacaacggaccatctcgtcctcccagattcttgatctcgacgcattacgtcaagtatgatcccaaactgtttttcatcaactttgccgcttgcgtgttcgtcctctttcctaaactccccgctgtgagtcgtccagttgccgacccaggcacgtctcgtcgagtcgcaactagctgaacctttccccctaccagctccatcgactgcgattccatttcaccccgctagagaacaaacccgcggcttccaacggggtcacgccgaaccctagtcgaccggccagtcctcacccgccaggattgcgaatgtccaccctcgatcccatcatcgagtcgagaaaatcctaggcactaccacaaggctcgctcagagctcgtacgcttcgggatgggatagacgatcgggctagaaaggccgcacgcggtcgggtcgggagaggcctgatgaacgaatttggttctgcagcatgtacacatacaagtgagacgagacgatggacgctttcatatatacgtagattcgtgaagtgttcgggtgcgcggtgggcgtgaagcgttcgggtgcgcggtgggatcggcttgggcttcctagcacaaatgaactgcatggatgtttgccgattacgagaaactatccgattcgacggttttggtcgacgatggccaaaagggcgcgagtatctctacctaggatgtgaccttgaagagcggtggggcacgtgaacgaatatatcggaggaggagggcatcggccaagatgggcacaccttagcgttggtacctcgacgttgtgatcattcttgacgttatggatcatgtcagctcgatggatctgcgtttcagggccagacatgtgatccgatgaatcacttggcggtctagtcgagtaccatacggtggctttatcgaatgaccgtcctgtgggactatcttatcattccgtctcattgttctctattaagcgggactcatacagccggaatcgaccagtccataagctttgacaagtctcatgttttcttcagcagtgcctagcttgccgatgcaaagcagaacgtggcaaatcaaacagaaaattctctcggtcgaccagaacgctggccgatccaacatccttgctttgttgcgatgtaggcgcccgcttattagtccatttggcttggaactgtgcaggcgtcaacgactcgagttaagcttcctctgctagagccaaacctagtcgtcctttaggcttccttcaaagcggatcgagtccgtgcccgccgtgtgccacgctcagctactaacgacttgattctatggtaataatcaggctatcgtactctggtattatcccaacaacatgagtcaattcttcgtgactacttgggctaagctgacatcaacgcacatcttgcagggacgagctccgaattagtcgactgagattccgcccttactccaaaaaacccccaaacccccgttcttctcagcaggtcgaactggtaccccctagtgagtccaggcgaagctagacgtattttagcatgtgactctgaacctagttttggacggtcggaccaaaaccccaggaacctatgtcgctgtgactggagcggggaaatctttctacctggtcgcgtattccatcaaacaatcgccagaccaagaatttccttgtcacaccgatcacacttctggcttggcagcattttgacaagccgggcaagcgcaatacaccgtgaccggcggatctacctcgggttgtgcgccggtactcttgcagtctgtcgggtctgaaggattatgaagtggggggaatcagacggaactgcaggtcagctcccgttaacgaaacgaaaaggatttttaccattatgatcatcatcgagcgattcaggttgtactagctagttacctataccttatgacctgaggtcccatcacgaagcgacagggtctctacgacatgacggacagtcaataggtcgtttcacggcgacgcgtacgatttccccattccgtgtttcatatttctcagtcaggtcggcggcgtttttcaaaaaaaatgacatttaggatcaatcgaggaatccccccgaatcgcatcagtcgcaagtcagatccagccctgttcaatccgaggtccggtaatcgataagagactgcaagtggatgacaggaatgttgaccgcggtcaaggggccgtcctccctcttttggaaagccgcacatgtccttgccaacacctctcccgacgtcctcatcctcctcctccttctggttcacgtcacctcggccgccgaacttccaccggcgagacatggaaatgacgcgatcactcttggtcagaggtgaaaaacttgtacacgccgataagatgggagatgtgtcaagtacacgtctgggctgcgtcagctttgattgagaaaccgtggaagctggagaaggtgaccggaccgagcttaatgttggcaatgatggatatcgagaagattaccgttgtataggtttcataaagatgtaattacaagatgatttcatcgaaaggggattgtgatgtgacgggtctatatgttgatgaggacaataagagttgtcgacaaaaaagtgatgacgaagtcgtggaattggtgatgggcgagtcctttggtgagagcgtcggcaaggttatcctgagtcggaacatggaaagaggctcgctgtaggaattcctggaagaagctccaaacacagtcggtcgggcaagagcacgggagggagagtcgggagtgcaagattcgggagctgaacgaggagtgggcgaagatcatgaaggagggatcgcgagtggacgagatttactcgcaagcgaaaagcaaagcagaggggatacagatggggcgcagcagttcacctgtcgtcaagcctcaagcccagctcgcctaacgccagtcgtctgagcccctcagtggagatactgccgactccggggcgcagacggagcctcttccttcgtcccaatcttccgacggcgacgctccaggatctaaacctccagctaagcgacaaaagacgtcagcgaaagtggccctcgacaagccgggccgattacgccgactacgggacgcccctcgggccttgacttttaccgagactcatgagggggatcaacgacttctaagcttcgaactttcgcaagagtcaggtgccgcgactaccaagtcgacgcaagcctacctggaacagatgcctcttctgaagacgatcttcggtgggatgtcgtgcaaggcggaagagacaaagaaattggtcggctttcacgtctcagtgaaggatatgctggcgtgctggaagttgggggagcagaagccatttgaggtcatacgggggcatgaaaggagcaagagcacggacgaggccctggaggagatggagcaggatatggacacgcttcatgcatgggacagtaaggctggcgccaaaactactgcttcttgaacgaggctgattccgcctgatggtagcgggtgatggatcaaagtgccgaccaacgcatacggtccgccaggccttccaagaccccagacgactgaaatgtctcgccgtcaaggatttgccactgcagacgagaaccatggcgggacagctcggttaccacgagctgatgggccagctccagctttccttcaagaaagcagaggcagagacctcgcagggatcgaatcccaacttggacgaacaattggaaaggaaccaattcggtcttcttcccgacgagaagcttcgctccagatacctcaagtctaaacgcctcaccatatacgaactcgcagaggtaccggatagcgagcacttgggccattttcaacgctaagcactccatgacggactggcagttcaacgccgttggaagctctacccatttcgtcgtcaagtttggggtcaaagcttgggtgaccgacatcgggggagtggtttcgggagtgatcctgaagccaggtaacgctgcggtcatgcaaccaaatgtccgacattgcgtctttactcccgaagagtcgatttgcgtcagaggccatggctagcatgtccgagaaatcgctgaagcctaccagggcttgttgaaggaggaccggaccacgtcgaatgggaccatccctctatggtatcccatttttacctatttcgccttggagctggccctggataccgatgcaaaaattatggcgcattgggatatctcagacacccagttggagagatttagggagatcttgcagcgttgtcttgggtgagagtatactcggcatccgtctaccccacctcaacatgcaggtctcgccaggaacgttctcgccgattacagccggccccatatcttccaagtcttcaaggcttgcgaaaagtctgcagcggtcgcgtctttcggtctcctcgaggcattcttgaagagatgaaacggcctcctgttttatctagagattttttattagtttgtttctggttgtcgcatcgctttattagtttgtttctggctgttgtatcgctgcgagactgactgggatcattgatgagctcgaatagagaatgtacgacgatgccgtttcaacgggtggaggctaccagagtttgctttgggatgtcctgatggagacggacagacatacaacgatcgctgaagctgttgcccttctaacgctgtcacatcgcaagtgaatgccgagggatcttgaagaatctcccgatctggacactgggaaccaatactggtgtgagggcttcaaccggcgtaagaaaacgagttgaaattgctgtaagctagactagtcttcagatgaagcagggtttggcagtgatctcgatacctcagccggatattgacctgtactgactaggctgagggatcaatgcgaatagcggcaagtatcgaaatacgagatcatccagaagaaaggaacgtcgcccacctagcggaggcgggaacggcaaggtaactgaagcctttctgttgctgcgctatatcggtaagcgtatgacttgtgcccccagtccgagcgatgatttcttccagaaaagaaagctgaagcctgactatttcctccccgatacataggctacccggcccggtcgatatcgctatccgttggcgaatgtgaatacgctgattcgcaccgattgcggaagctggtacaatcgggtcggtgtgcaataccggtcgatcacaaagactttcggaactcctttttatgctttgctcctcgatgggctctgaacgtaatgctttcttccggctacctcgcttttactcaggccgagaaccctcgcatacgcgccatgagacactgtcgatagtgccattgtaggtattctggtttcggccaatactgtgcagaccgaatgttgaacctggtatgggggattgccataccatgccaaagaagcgcgttctgaaggtctaaacggaagaagtgcgcgtatagtatgccattctgaccgcacggaacagcattcagtatccatgacgaaaacgatttgatatgtactgaccctatagtaaaatgagaaatcgagccgatcgaacgccttgtgtagagcgggatccagtaacaggccggctgaagcgtgatacatctcaccaactggctcgttttcccgtaggcccagtattgcacgatagacctgtatgtacatgcaatagacagcaatttatcaggctgagctccgatgaagctgcagtgcatcccttgagcgtcgatcttcgatcgattatactcacgtcaggcctcgacttgggaacgatatgagccgcctcgcacgtcgtgaggaaggtaccgctaatgagacaatagacatcacgaacgtgtatcatatttctgaaagatgtcttcgaacagggtcagatcgtttgaccagcaggacataggccggcttagacttacttgtgagttgggggtggaagcataagagtttctagtggaaatgctgccgtccacatcggctggcttgtatggggtagtgtaggatgggcccggtgcaaaatgcaacgaaccggaaccttctggaccaagcaagtacgttgaaggaaacatcagtagctggcaggttctagccaaatctacggtttatcggacgtaccagacgttttatagacaaaggttccagcgatcggcattgcctgtgcattgaccggttgatcattcgcaaagatccacccgtcgatttctacgacaaggagtttgattacttcaaggacgtagtcccacgtgttgttacccccttgtgcaacgaaagcgagaggaatatgagcgatagcttgttccgttgcagagatgatactgatgcgcggtccatcccaattgagcacagcacgttcgtaatatttggtctccaccagtgccggtatggaagtcatatcgattgtttgttgctatccagcagcgaggcataagggaataaagcaggcatacatatgtattggtgttgatgaattgtagcaacgctgtatctgggtcaaagtgcagcgtatacaaccgctagagcgaacacggttgccgagccttatcagtttaatctgatttggtaatcatccatccggaaaacatccttccgcacgacctgtttatcgatggttatgattatcgatccgaggtagtcaagttagtctttcgaagagagccctcgagtagaactctggatggccgatgtgatcgttattaaacaggatttgccaagttggtggatacttctttgcctcgctctattgcttgcatgcaaggcagggctgtaagcgtcacacgaatctctggcgcctcgtggctcatacaggttcacgaccgcgcagaacggaaacaccgcagatctcgctcgaagcttcattcccttcatcatcgggaccggtatcgcgagaggacgtagggggggggccggacgcttcaacaatgtcatctgagccgttcactctgattgggttaggggaagtaccgactggaacgcaataccgaggccttgtaaggcctaggggcaagccgtactcattcgacctacaaataaagggagggtcgtgggtaatcttagcaatggacgaaaagtgattggacgattcgacgactcggctttgacgttgcagatcctggagttcctggtacatcggcttgctccgattactgcgggtccgttccggctcggctatttcccgtaacattgggcaagcaaaataagcaaaatattgctatctgttcagtaagctagacaagctgcggaagctgttcaccaaactgtggaagctggtcttcaaaatgcagatgctgtacaacttattcttccagctacacaagctgcacaggctgcacaagctacgcaattgccatggacttgtcttgcctcttttgcaagctactgttaggccgagtgcgagctctggcggaggccgccattcgtagtgcccgtcgagacatgatccgggagtagtatactagggtaggactatggcaggactatggtatgagatgtaataacagatggagaacatacacacaggatatacactacgtacaacacatcaataaacaacaaatatctatgtcgtccgagaatgagctccgccggaggtggcctgggcggttacgcgccggatgcgtccgccgctataacaactacccatggtgctggtggtgccgagttgctgatcgtagttgtagttcttacatctctatgtttaacctctcccttattactcgtgttcgtatgttgtaactattggtaatgaggaatgcaatattgacgcttgatctctctactatacaagacaaattggccaagttctgtcgatatgtgtcgactcttgtatagccgttcaatcaagcgataaggtcatctgactgcaactaaggtaaacatatgtacaggaccaggttcagagaatcgcggagaattgtccaacatcagatttcggtttttttcccaaaagtccacgtttgttagcgtgggtggctgtacccgtggcgtggcacaccgtgaaatcgtacgattgctcgtagacgcagcctcttgttcacttttgggtttgttgattttgtgaggtggaaaggtcgaacgagattagcgtggccctccatgtgatatcgtcatatcatcagcttctgtaattcaagtcaatctagccagataaatcgctaatagccttaggaactaggtcgtatctggacaacaatgtactttccctctgggcctcccaaaatcttaggtctctcacagtcgccggacggacgggtgatcagccttgttccgaataaacggtcgaccctattcatcatcctcaagagcaggtcattcgagttgtggaacgtcagggttagtcctgaattaatcgccagagtggctcctgtcctcacatgaatggtatttgcgtctagcccgccacccgattgtctgtcgtcgagcgttcaacgagttccttgagcaagtacgggagcaacgtctcgctggcatggactccgaacgggacgtcgctggtggtgctcgtgagtgtgcgtgtagtcgaaatcgaggatgacgatcacgaattctctctctctctgtttgcagacctcgacatcgcacgtcctcgactacgttttacaaacacgcgaacagccgggggacgatgtgaccccgctcaacccgcccatcccgatcgaccatatcacgacctttccgccgtctgccggagagggcttcatcaccccttacgcttcgagttccacttcgaagcattcggcagaacagatcaacctcgattcggcattggacgacgtacaaggaggtcaggcgggagaaggacccgtcaaggatggattgttcaggtatacgtactcgagcttgggattcggcgtcgatgtcctcttgaacgggatcgccaaactaggaagaggcaagagggccatatccgaggcgctgaatttcctggaaggaatgccggggagggggacgggactgttaatggtggtccaggacgaggccggttcttctcagcagatcatttcggtgccttatcctctcaaaccggatcatctcgctggagaagactcggaggaacctgtcaacatgccttcgaccgtacaactacctacgcagacctcgacttcgatctctggagccgggacatccactcgattcggtgccgggttgctcggagcattgtccggaaggtcaggaacctctggcgacaaggggaaacccgccgagtgggtagcattggatgatgaggtcgaggtcaatgtcgatgtcgtcaagtggactatcgggaccgatatccaattccccgggctgactgagggcgggttcctgacgcacctagagtctacaaagactcatggctggtatatcggacggactttggtcatgcaggtcgttctctgccggtatcatcggccgactacctcgagaaggtcgatcagcttgttggacagcgcgaccgagcctttggattgggtgacgactcgtttgtggccgatcgcagcacaggttgatgcgggacgagctacggtcgtcagcttgaacgctagatttggggtttacaccgtggggctcgacaggtgagtcggtggtgaacgatcatcgtgtcgctaaattcacagctgatcgtgcgtacagcggcaaggtggtggtactcgctcttccgaggggcggcgaggagccaaaagttgagtggactatcgagcaggacgatgtgcaggtgaccggtgagtcctaatcgggatcccgtgaaatcggatcatagctgagtcgaatgtgaaccacaagacgggaacactatcagcggcgtcaagtctctagcttggacttcagatggatgtggattggctattggatgggaacggggatggggcctgtggacagtgaccggtagacagactttcttcagcacaaagcaggggtcgataggagaagctgcaccagccagtccgggtccggccgaaccagtggttgaccgatcatcgcacaattcaggtatccagcttatggtgcgtatcgcttgactgatgccgtgtccatagattgatcgacgaggcgtctaacagacctggacagccggaaacaatgagcttgtaaagctggaagacgacccagctacaggtcagtgcgaagcgtcgatgttgcctatcatgcgatcttcgacagtgagccagctcaatcccgtaagtcgcatgcgtcagatggtgttctacttctcggcttgatgcctgcattgatagtctcagtccgaacaaccgatgtttgtcgccgacgatacgatacgcatctaccgtggacgtagttggacaccatcagcactactcgatcctcacgcttcgccctggcagaacgtcaaggtgagaggctcgcatgcgtaagccaattgtcgaaactgaccttctgatgggggtccaggtcaactcgctgtatgctgcggtacaatggcccatacgacactgttgcgtttccggcgacggtaccctcttggcgatcgccggacgcaacggactcgtccattggtctgcgaatactggccggtggaagatgtttatcagtgagacggaagaagcgagctttagcgtcaagggcgggatgatgtggtatcatcacgtcctcatcgtggggtccgagagcgcccgaggcgccgaggtcagtagatggggatatgtcttggcggatgccctcaataaagcatcattcgttttatcagttacgactatactcgcgtgatcaggaattatcgcatgcgaaatgcctggacactcaagctctgccacacgccgtcgtcacaatgaccctccagggatcgatcttgctcgtcttgactagcgacaatacgctctatcattatagcgtgaccacaacccgcgacactattcgcctcgtcataggagacagtatgagtctccaaggcctcaacccaagcgccagcaaagtccgagccttgtgtggattcagcgctggacgtgagtcacggcgttccggtcgagacgaggtgatgatcgcttataaccatgggaccggtctcagacggcgacctcggctacgatctgttgacttcgaccatcgtactcctgtctgggacccagctggtagtattagaaccgaaaaaggcacgtgagattccgatacgcggcatctgccaaatacttacacacatcgattccgttagggtgcccacggtggcactcgatatgaaagccgtttgctgtcaggtggcgttgagagcttttacaagtccggggcaaaaacgaacagccttcgacggagcctctgggggaccaccaaagagcgaatcatttactggccggatgtcactgagcaagagactatcggagtgccgtcggcaagctacccgataggcaagtccgctagagcctcattcaagccccgagccgtgctcagcattgatgacccgatagccatcttgcaagagcctagtctcgttgtaacgttgggcgttcgagcggactcacaatccggcgcgccgtatcaaggaatccagcaggaatctggtgtaagtcgcaacaggattcggtgcgtcgcttctcccatctcatcagtcgttcccggctccaacaggtcgtgctgtatttgccccaatggctcgaatactttttgcgctgcggagacgcctcttcagcgtacgaattggctttagcatcgcaagatctgccctactttgctcacagtctggaaatcctgcttcgagcgacgatcgaggggtctaagcgaaacgagatcttttcagacggtgtagtccggctgctagactgctttcccgagggcttggacgtagcggctgcatacacgcgcaagaccgaggtcgagcattggggacagctgttcgacctgataggggatccccgagatttgttcgaggtaggtttgcaaagcgcatgcatcacacttggccggtcttgactcgtacctgcgttccagcgctgcttgaactctgaacctccaaggctgtatactgcttcccggtatttgatagcaatcaagcatcgcaatgtgacggacgggtttgaaattcaagaggtgagacgcctgcaatcttcgagagacactcgggttgagcaagtgtcttgcgttcaaaggatacgacccggttgctggaaatggcctttgaagcgggagagctcgaggtgaggctccaggacaattttttcaagttggagcatgcctgacattacttttctacagttgtgcaaacagatcatcagatttctggattcggtcgatgcgacaggctatctcaagacgcagtctcttgagcatttgactttggcgactgaaccacaggcgaatggaatgctgatataagcccaagcaaacccgatatacagctgtattctagaccgagcaaatgtccgtgaagcacaaagagtcattacgatacagatctgcatggccattaccctatcgatcgatatcccgacgcgcattgggattcatcgttggcgcaaaagaaacggcgggtccaggacggttctgtcgattgaccacgaagcttttggtggcctgttcaggcttggcgtcgtgcacgaccgggagggccataggtgtcgcaacgggagaagcggcttgagacgagttggcgctgtttcgtcccgactgattcgctcgtctgaccacgaaacttcgcggcggttgagttgccggtcgtagcgcctcttgagggagatctggcatggcatcggccgtcggtgatggcggtacggtgtgcaacggcacactgcggctagtgctagacgacttgttgcggttgactttgaacgatcgcggaaccggaaccggcgcatcattgaaaatcacctcgcttgacttgcgtaaagcgttttcatccgttcgatgttcgtcgaagctcgcccgagttcgcttatcgctggtcagtccgagggacgagaaccagctgccgtgacgagagggctctggatcgactcgcgactcatattcatcgtcgagctcttcctcgtcgtcggaacccgcctgagtattcttcctgctgcccaaaccgaaccagcttgtcggtctcgatcgcttatcagactcggacgtgggcgattccactggggtcgatcttccgtctggaggcattcgctgtaaaccaactggacgggcgaaatcgcgggggaagaacgactcagctgttggggttgcattgggactccatgtcggagtgttctctccagaacccgcaagtggaggatacatgctcttgggggattccgaatgagacgagggaaagctctcgatgatggcagtctgagactttgtccgagtgtgtctccctgatgggtttgaaccttgtcgtgtgctctgggtcggagagagcatgggccgcaactggtaagcaaagtcggtcgagattgacgatcccgcttcaccggcggcgctccgatagggatccttgtacgtcgccttgcctccgcggatgacggagaagcctcgaggagccgcgtcatcctgcaaaacttcctcctgagccgagtctaccggtgtgtatcccgtatttggactcgagagcactggccatccggccggcgtctgaccggggaaataacccgcgttaccgagcccatcaggggagatgggtccagcggtcgtgtgcgttgagaatcgatccagcatcatttgcgtgttgactgatcctgccatcgagtctcgctgcaccgtcgaggctttacctgccctgcgtcggttgcgtcgactagcctgggacaatccaccaaacgccgcaaagagtccaccgtccagggcatgggtcgagtcggcaaacttgacattgccaaaaagtcgaatgagcccttccatcactttggaaacgagcatcatcaagaacgctagaagagccaccccttgcaggatgaggacagtataggcgatccaaccggcgacggcatgaccgatgttgatctgacccggagggcagggaaacgattttgtcagacaaggtgttacgcgtgtacgccgagcggtagactcaccgccggactcatgatcagaagcaggacggtcgagacgatcctgatgaccgtaaagaggaacccaggtacgaccatacccgcaccaggtctccacggctgccagattgtggtcacgaggccaaaggcaatctcgataatgagcaggacgacggcttgagcggtaccgttgttctggcccgctccgatagcgatcccagtggcgagactggccacgaaacgtaatgcctggtagagttgattaccctgtgcgtatatattgtagagaggtccgagggagagcaaggtacgcatggcgtcgtaaagtttggcggtcggcgttgtcgagacttggatgagaagatagatcgggaggagaactgaaaagacggcaaacgtcaaggccgagaggatcactgatgcgagcgatgcgacgtcccggatcgtccactggtagaccgaaaaaagggtcaagggcaagtggaacaagatcaagatgcgaacgaggttgcctgcaggaacgttgcaaatcagcccgtgttgcgacgtcggcagcgttcgtctgacctaccgcaaagggcagcgaaatggaacgctcccatcggacctttgagcttgaactttgcccaaccctttttccatttggtctgccggttggcatgagtcgggccgctcgaagcgatgcctgccccgaatgccagcgaggacgatgcgccgggtgtaggcgggacagactcgctaccagactttttacctagcgagaggtcgtactcggaccaagagtagctctcactcgctcgatggccggcacccatgctcttcctgccttgtgcggtgccagtcgtggtcgctgcgaggtgtatcgccgagttggcgctccgcaaattaccaccggaaaggaaaaggacgtcaactatggcgtgtgcgatccaaaagagcaagctgaatgcgatgatgcccgcagcgatcgcaaggaatagggacacgcatgtcccgtacatgtctctcgaccgcaagccgatggccgtggcgtacgactcgatcccgtcgttcgaattccgcatattcatgaacatattcgaggcggacgagtccatgtgtaaaggagagtcgagcgagttgaattgatcgacaaagttgtcggggatgggggatggtcggattgtgagcaggttacggcgtttcgactcggcgttgtcgccttgaacgagcgcgacatctggcgaaaaggactaggtcggtttcggttttcagcacgtagtcagtgttcggggactcactgccaatcaagttggaccacgaagtcgtagccaggatgggatctataaagggagtggctcagagtgggccctcgtcgcgatcactatcgtattaaacctacacgcaaagttgggccattcgacagcggtcatccccaacacgctgatgaattgaagatgccagatgacgtccctgaaacccggtgtgactgcaaggcgaccacggcgatcgtatcagtcggccaagtcgaaatggaagacctggcttcgcacgcactgaatcgcaacaaccctccgctgacgccgagccgttctccgcttaatccactgaccaacatggtcccccacttcctgccacccgatcgtgctcccgacagtccgacccgggcgtcgacgtcgtcgccggtagcatcaccctcgcccaccttgccgacgacccacccggccgcgaatctcccggcccaagatgagatccagtacccgatggctaggcccgcagggatccagaggatcatgctccagtaccaatcgtccgggtagtaaggcgagagctcgaaccgtatacacgccagctcttgagcaggcacgctcgagtcgacgatacggaattcattttccagcgtggccagaccgtagtgatgcgagagcgggatcgagatattgatggcgagcggtccggcttgaaggggacagtaggtcgtgttctgcgggatgtaagggtagggtaggggagaagccgggaacaacgagttgcagagaaatgtcgccgtggaccacacgttgaatgttagatcttcggtcttttgaaagagggtcgctgtgatgccgaccgtatgtgtcagtattgggtacagaacaagtcgtccgtccgtctgtgagtcgttacgcacccaacttgccagtctcgttactgaacccgacaagatccgaaccggtctctccgatcaggttgatccgaaggacgttcatcccactttctgatccggccagttcgagctcttttgcacgggctggaggaaagatttgtgcccatgcctggctgatgttgatcaaggccgagggatccgtgctgctcgagctgacgccgcatcgagagatgctgggagaatagatgaatgccgagacgaggttcagcgagaccaggcagaagatcaggagctgcatggcgactttgatagccattcttttattatgatgcagagcagcccggttggttcgatggcggtcctagattaatcgttgattcatgacaagcggcgtggtcccgatgtcgatctgggccggcgttcgagcttgtcaacggcgagactcgaggggttcctatcgagtttggctaaccgacttccgtgagataagctgttctaaaggcttcagcggtgactgtcggtgtctacgaagtcaagaggtgttcaatatcaaacattgatcagttttcgatcggggtccacctttttccctttgacgggaacgcgctaaactaaagatccgctcgagcccatgaatgacgtcgtcgtcgtcgtcaacctctcttttctttggaatcgacccatacgatcaacagtcagaagtacatgtacaaggggttgatgcgctagctaatcatgcattctataggtagacaaagtcgtacctgcgaaacgcgaccgggatcatagctggtcagcgactacagtctctcgcaactctgaggctgtgcatgcgactcacttgctcaacgctgtcacgagagccgccaattgaggcccatacctcgccgtattgtcgtacagctcgaaaaggggaatggctacggcgtcgagtgatggacgttagtctacaaccaagcggaaagacacgacatggccatcgactcgcctagcagtttcatgtttttggggacagccagaacctctgcaaaaaaagcaacgaagtgattgtatcgatcagctgtggcgcagacacatctccatgttagccaaatctactcacttcgctcgggcatgtggatcaggtaaagcttcttgcactctttcggtttcgtcacatgaggcggggtgtaggggtactgtcgaggcagcagatgccattagctaacagtacgtcggactaaagcggcatctagacaatgactcaccatgtacgtctcataattcggtctccaccacgttcccaaacaatcacccacttcccagtctccgccgcccaggctgtccacgccgctcgcgcccgggttcatctgcgaggcagagacgccaggaggcagggtgttttcgttgacgtccatcgtaagctggatatcgagtcggcgcttgagaccgagggcttcgtcttcaccgggagataggtagtggccgggtctataggtggaagcgtgttagagatagggttaggctggggactgctgcatatcggacttgcagcttgaaaaaggcgttggcgatctgcaacatcaggatgtgagggtgaccatggtcctgaggtttcgatagagtgattaacatgtcaatagtaagtgactgaagatcgtaagaggtgtagacagatcggtcgctacatacatggaccaccaagactccttccaccgttcgtctcattcctgtagagtttggcatgccgaacagagcaaagacggcaggatgagatggagaatgaggtgtaagatcacgtcagtataacaagaatacgagccttaagaaaacgacattgcactcgcccttggcctcgtagtcattcgtcagtcgttgcaacctggccgcgaccgacgggtcttcctctggctgagtctcttttgtgctgcaaatgtcgtcaagcaattagatcgacggagatcaaccatcagcaagcttgtcgaatcgttagtacacggcagcgagctcacctgaacgtaaagttcgagagaggttgtctgtgggcgtcaaagtatgacgattgcgagtttgatattgcacgggataactagggcgatcagttcaagtccctttgcgagcgccgttcctttcgatttgctcacagactgatagtatttgacattttgatgtgttcctagtgtctgaactgtaccgagaagagttgcctcgcgatattatatgatggccagtcagctgaatggaatggttcgagagggtagatcaaagttgaacaagacgaggtctggacatgcgggacatgacgggttcaaggtggaaacacggagcaaacgagtggtagactagcagcatatcagtcaggttaacacgcaaataatcacctgacaaccgaggtcatctacacagataaatggcaacctgctaggcacctcgtctgcccagactctcaagatcaactctaattgccgggtctgttactgtggatgtgactttgaatgacctgtaccccactcgtcgaccttctgtttttctcgtttatttccaccttttcatcggaactttgctcgacctcgataagagaaaaaggcgaaatcgaatgttgaacaatacgacaaagttggctattcacagtcccttcaccacctctagagcagctacaaaatccagatttacaacctcgcaccatgtccgattctgaactccacaactctgacactgatatgactgacgcaccgctatccgccaagcgtccttcgtcgccttcgatgtctgaccgatcctcgaaatcgcaacgtactcaggtcgagtctcaacacgccgacgatgcaaactcgcaaccaccagggtccacattgtcggccgcagcacctgcattcgttccctcggtctctgcgcccaagatcccggccaagatcgaggccaacgtgcacaagctgatcgccgccgggttgtcggacgcgaccatcaacgccaggttggcatccaccgcggcgaggcacggactcaagccttaccagttcaacccatcacaactggctctcgcacgggccaactttgaggccatgaagaacgggtccgggaagacgggcgaagcggcacaagcatcgagcagtactgccgagactcgaccggtcaagcctatccctgccaaaccgctttccatgcgagccggagccaagacgtacctgcccgaacaggccaaggtacccaagaccaaggaggagagggaaaatagcaggaggctcatcgtcgtattgtccaaggtgggtcaggcgtgacttgctcgtcatgggcgagcgagccgtgcacacgctgattcgacttgtcgtcgcatcgatcgtaggcctgcctggaagtctaccgatcgaacagaccgtcgcaatctggtgcgcaggtcagggacaccttgttgaactgtgacgaccatcaggggttcttggccaaggagggaagagacatcgccgatgccaggcccgatattacgcatcaggtagggacctcgcacgacacccgcctaaactgtcatgatcactgacgccttgccttgtttgcagtgcctgttgacgctcctcgactcgcctttgaacaaggccggattgttgcaagtctacgttcaaaccgccaagggggtactcattgaaatcaacccgagcgtgaggattccaaggacttttaagcgattcagtggattaatgggtgagtggcggcagtctctgtatcaaggtcatttacgcacgccggcggggaacgacacagccgaggtcatctcccccgacacaacccctcgacctgctcctaggattcccctcaacgggtatccgaaagaacaaaatcaacggcacgaccgtggagcaggcgggacgacgattcacattgcgcgcgctttgacctcaacgtgtcactgtcgaccctttgtatgaaatcccgagcgtgagtgagctgatcttccgaacgacacgtcgtttgccttgtctttcgtcgtcccgtagtgcaattgctacaactgcattcgatccgggggaacaacgggccggacaagctgttgaagtgtatcaagggacccgtcaccaactaccttccgaccaagtgtatcaaattgagtgagtctcgcgtgtgtctctggtcgacgatcggtcagcactgacagccggtacaccgtgtgacagccctgtcggccgacgctgagccagtcaaattgagcaactacgtgaccacactccccgagacgcactcgatcgcaatctttatcggagccatggccaggggtgaggacagtttcgcggacgaggtcgtggatcaaaagatttcgatcagcaagtacagcttgtcggcgtcggtcgcttgcgggaaattctgttgtgccattgtcagtacctcggggctcgtcgagtggtgaagcgagactattgctaatatcccgggtcgctgatatctttaggaggatctctgggacattgtctagtaggtcagtgttttcgatggcgtggtactggtcggacatcgtgtacgagtagcgatacgaatcagagtatatcggagtgtatcatatgcgaatccgttcatcctagttcgacggcgcatacgagctttggcctgtcctggtcatgtttcgcaatcatttgactcaagcacatcaaatcgtgccgcgtgcttcactaatcgagatattccagctgtctgctccggggctacgggacgcgttgcaatccgatagcgtcgcttgctcagcgccgcaggttgtaagccaggcatgatgccgactcagagtagcggccggatagtgtaatcgataccggcagtgggatgtatcggccgacgagaaatcgcacggctgtcaaggcgacttggggataaagcgagttcgtctgcgcggtgtatttgatagagagcaaagttctagccagcctcacacaagcgacactgaacacgaaaagagatgcaagtcatgttctgacgatgaacgattcctctcgcatcctgtgcagtactcgaacctcctagaactgctgaggcctcgatggctgtggtttttgaataatcggtacctcgggccgcaagatctcggggcgagtcggcgtcaatcatacgggagcgatggcgattaattagtaaatcgtcgacgtcgagcttttgacgtgcgaggaacgatctcttgggatacgttgcaagatccggagaaactggatgattgtggtcagtagatcctgttttcgtttcgggcaacgcgatcttccaaaggcgggtctggatctcgacagattcactgcatcgtggcaggaaagtttcagtccgtggacgatcgccacgagttgcggttttcaaagatggcggcgagcggcatctgtggcgtcggcgttgtcggttgctcgcttgtgatagaacggcaaatgaccacaatctgttgattcgatcgtcgcttcgaccctcccggctaaatgacgcatctgggcgatccgcgagccccaaagtgggacgtcttgcgtgctcgatcaatttctcattgccaagcgtgatacgccgtgagaacgtgaatggtcgagagtagcgagtcgcagatcgtccgttgttatcaaagtggttcgagaactgtatattgccgttatgagcgtgtggttgcccttcacgccttcgcgttcaaggatcaaggaacgatttcgatcaagccaacccaatctgcgtccgaatatcggctcgtcacagaagaatggaaacaccgatctgcgcgctatctagccggtttcggaaagaacggaatcaattccgtgtcagccaaaagagctgggtgggcaggaaactttccgtgtggcgcgtctggcgcgtaacaagatcatgttggtcctggaaaatggcacagcgatttcgatattcccattgctggcgatcggccctggcagaggctgcggtcctagctcggtcttggccttcgtttcgacagggagaatcctccccgtgtctcagaagggtggacctgtaaatgcgcccaaaatgcctcgagcgcacggccattctcggcgacatttccatatcagccacccgatctcgtccaagcgaccgttttcaggtttgtagtactcgtgaattttgatgtgaacaaaagtgcaatgacagtagtcagtatgctgagttgcaccatcgtgttcaccactatgaattcgtcttttgtttcagagcgtttcggctaaacatgagcatttccgcagtcacctttagtgtgccattccctagcgatagcatggaccctgggacccccgagtacccgagctctggatcgggatccagcgtagattcagcagcgatgcaagatgtcgtcattccgcgacacctcttgtctgctatcgagggaatctccaccaggggtctcggatccgtcgaccgaggggcgagctttgggttgatatcggattccgaggatgattatgatatccagcacgcagcgctggaacagaatcgcgaggcgatacacgagatcgctagcggaggtccgctttcgggaagacgggccacaatcaagtgggatgtctttgtgggcgaagccagtccccagagcgaagcaaggcgcttgactcgaggatccagtgcgagggctggcagcgatgcggagaagggtcacctttcgtcgtcgccattctcgtcccctgcgaaacctcgcatgcctatcgcgccacccaccgccgctggaggtaatctccggacgttatgggctacagtcgacccatttgaatcctggcgatcagggttagcagaagaacaagatgacgcaaagacggacgacatggcaatggattggaagcgtcgcgatactcaggcgctcgatcctgcagtgccggtcctcggatggtcggaacaagccaggccacgggtggactcggctcgctcggcgaccgttcagactggaacatcacattcctcaggaccggtccttcggcccaaaccgagcgtagcctttgaacgcacgagctcgtcggcgcgaccgttcggcagccgcaaacagagtcgcaagtcgagcttgtgggcggtgtatgaccgggccaaggtgcgcggggtcgaattgcagcgccgacgatgggtgcagatcgtattcgagtataccttttacgtcgtactcttggcatttacctactttgtcctcgtgggtatgcccttgtggaaaggtgccgtttggtggctctactgggtcgtcaagaacaaattcgtcgttgccgggacttggtctataacgctcggtgtggcgacaatctatgcgtttgcgcccttgctccagcagttcgaggtctatccacctatgcccgagggctaccccgataatatcgacccgaccaagacccctggaatacacgacacggcgctgatcatcccatgctacaagtctgaaaacatcatcggaccaacactggtcgcggcactcaaggtgtttcccgccagtcacgtttacgtcttagccaacggcaacagcccgacaccgctggacaatacggaagcggtgtgcgacaagtacggcgttaatcacgtgtggtcgccagtgggatccaagatcatcgcccagttcgtcggttgctatgccgcaagacgattcaagaacgtgctcttgatcgacgacgattgtgcgctaccgcccaattttcccatcgtgagcgatcgtatgaccgatatgattcagtgcattggctacacaatcaaatcggtcggacccgagtcgtctcggggtaccctctgtcaacaggcgcaggacttggagtacaagctgagcgggattcaacgtggattcgccggggcgattggatcggccacgtttcctcacggcgcgattagtatttggaacaccgagttcttgatcagcacgttccaccaacatcccggatataccgtctccgaggactggttctttggtcacgccgcgagacagctcgggtgcaggatcaccatgtgtaccagcgtcttcatcgagaccgaaaccccttcggcattattctttgcctcgggcgggtcccgtggcggattcggcgagatgaccgtgttcaagcagaggtttatgcggtggaactttttcttcgtcaacgggttgtggtacaacatggactatatcgtcaggtcctggaaactcggctggtgggagtttggcgccaagctgtttgtgtttcaagaggtgtacgagacgctgctttacctgtttgtgccgttcatcgtacccatctcgtttgccgtccaaccggcattcaccgcctacctcacggccggagtgctaggaatctactacctcaacgccacgatcttcaacgagattcatctgcgcaggaaacaggaacgcgtacccgccttgaccgtatacgcctattacccggcctacaagtttatcctcacctttgtcaacgtcgccagttgttactggtcgatctacaagtatgccaagtacttttccaatcgtcaccccaagatcgtggaagacgccaaggccatcgatgtcgtcttgcgcatggatacgggtcgacgcatgaccgtcacagccatcggatccagggccgagatcgatgtgggtggcaggagaatgacggtgatgacgatcggcgaaatggatggcaagcagagacggatgacggtgcaggtcggcgtgtagatttggcgcgcctttttcaatggaccgttttgatacagttgtagcgatcgataagatgtatcctttatggaccagcaatgcaattcgcgcagtagaattctctgcgcctgcgctccgacgtcaacaaggtcacggatcaaagactcgtcttcgctcattggccgaggcgggaccatgaaaattgagctacgaaaatcgtccgatctgtgttgcaggtcagctcgagatacaccgaagcaacgttcgagctcgttctgtgtcatttgcagcctcgatggactggcacagctccactgaataatcaatgtcaagtactgaagttagagtctgatcatctgtcgacagttgactttcatatgcgcccaaccatgacgggctcggtctcgtgcctagctcaagcgaattgtcggtccaactcctcgctcattgtctatgtgccaagtgaatccgcctgttcagccccacgtaactgtcgcggagtcttggcaccgcgatgcatccggtagacccttatggcccagattcaagaccccattgcgccaactcctccttaggggttagggggttaggggttagggcccctaacccctaacccctaaccatcgacgaacaagtccctttgcacattgcaacgcgtagttattatattcgtgttttagacacaacgcctcgaaacatacaagcaatctcaagcgtccattcagatcgagcatatacgttcacagaatctccaccgattaccccttcctctcgaaaaacacttcggctccgttcctgatcccaaatttgtccatgtcaccattctcgacgccctctcctgctccccaaatcccttgaaacccaactccgccctctccaaaccgcgcttgtatcccacttccgttgatatcccacaggacggctgcggtgtccggaagaaccagcttgcttgtcacgttgaacgcgttctcaccaaagtgatcgaaccagagctcgtctgcccacactttgtcgatccgggcccgcaagactgggctgaatccgagtgcgtcgttccggctcgattcgggacgcttcagcaaggtcccagcaagctcaattgagaggttcccatacgcctcgttgtgataaataccgaccaacggcctgaatccctcacgcgaacccgtggattggtccgaccgtcctgctacctccttcgtttggacctgggctaaaaacctagtcaatttgctggaatagagacgaccaagttgtcaataatgctccatgaggtagccaaatcaacccaacgtaccgctctcgccagtcgatcggctccaatcccagcaactcgtcgagtatcgtccacttggctacctcatgaaacagcgttcccatttgctcgtcgtttaccatgaccgcaagaccgatcattttactgggtactctaacgacttgagactcctgtcctggcagatcgcccccatgttcgacaatctcatgacctcggtagctgtacgtcgactggcccattccgtactgcggtacggtcatctctggctcgtctgaagtagacctggaagctatgcggggccggcgaacatcctggagtatgagcgccgggataactgactgattcgtttctggatgtcgaccttcgagcaacagcgtttgtaaccatatgatctactgaaacaagttgtcttgagccttttatcatgaggtctcgccgcgctgactcgactgaccagatccttcgagcaggtgatgacacctccagctccagcatttcctcgccaatagcgtgcgtaccagcccagagcctgctctttacctcgacaccggtcacttaggacgccgtgatgctcctgtacatctgtcagacaggcacgtatatctcgtactttggagacccctggcgagaggcgtctcgcaaacccgctagctagtcggttcgtggctcgagctgcttgaatgtcgtagaagctgtcggtcattcccagcggtctccatatattgtctctcacgaaatcctcgaagttttcgccgaataactgctccggcagatacgaggcagcgctgtacgcaatattgttatattgccatcgggttttgacaggcgcggatgccctgagattagcgaacaacttgatcatctgttgagccgtggcattggcactttcggaacccgcaatggatcgattagtatttatgcttagattatcaccctttcgtatcacttactcgtatgacaggtcgtgcctgggaactcctgtctgatggctgagcaattcgataaatgacgtctcgcgttgggcgtccgggtccatcagtcgaaatgaaggcatgaccgcatgaacaggcgtttcccaagtcagattggctcgagacagtgcgagaccggcgacaatggaggtaaagagtttagaattggatgcgataccaaagagggtctggagcagaacgacccatcaacacacggccgaagaataccttcgggacgacccacagtatccgtcaccgggtgaccctccgtattcatctttcccagcccgacagtttgctgcttccacgtcgcgtcttgctccatcttgaccaatgcgattgccactccagggatctgccagtctttccgtaatctctcgagggaattgagggtgcgagtcgagaggatgacatcgcctgcaagattgatattcggctgcttgggttgttccactcgcgacctataccacagacccatcgagaggaccgcagtgcatgcgatcgccaagttgaagttacctaaatcacgtcgatgaagagcacggccgaaacgactcttttcttcgtgtgcacggctttcggatctcgatgctttgtggctggaaagagcgcggtagaccagagcgagagcaagaattgcgccgcatgtcaggagtgatatgaacatcccgtcatcttgcgttcgatccaaccgaatcgacaacctgccaggttcgatcatctcgttaaatcaaataggtcggaaaggttgtttcgatcgtgatcgttggatggtgagaaggtgagtctccatccatctttgcgagcgaaggtgctactaccactctaaatacccctaccacactgcttgctgtatatgaccgatccgactcaacgacctgtgcccaattcggcgatgactgtcggctgaggccgaaatgacgcgacccaccttctcgacccttaaagaaggatttcggcgtaattccaagcccccttgcaacttgttctcctacttcggacacaaatgtggcaggttatctggtgccgcatggacacgatacaaaaagggcagcagagatcacttgatctcgtggctgacggatacatgtcgctcatggccacagcaaaacatgccctaattctctcgtggccctgatcagacttctgtccgtcgtcgaatcgtatctctcccaaatgttcttgagcagcacagtcagctttggatgatatcgtttccccaacacggtcaacgccctgacgcggcactgcgcgtcggacagaaccgaagccgagaggacaaggggctgcatggggaatgcgccagatcagtcccaatagctatgtcctgcagcgagatcctcgactcacccaacccaaccactgacagtcgtcgtccgcctgctcgcaataaagcaacgcgtccgcggccgccttgcggatctctggcttctccatgtcctcgaggtagacttccgtgaggtagtagagccagcaagcgttccagagcgccagtgaccgctctctgagcggcgtctcgagctgttccaaactctgctcgtcctgtctccattctatcatgcgtcgatgagtggccttgaacgccagcccgacccgtcgtctctcgtgacgagacagagattgaccgaacagagcctgctcgcccgccgcacccatctcagccatcacttcatactgcgtcaaatcggccagcccatgctcgtcgtcgagtcgaatcttctcggacagacgagtggcagagtcgatgaggacctgtaggagtggcagatcgatcggaggaggagcgaggcgaggggcctacaggatagaccatgggatcagctctcaggccggacctctagattaggaatgggcacggacgttcgcgtcgatgggacagagtgcagcagcaacgggcttggagcctacagcgatgctagctttatacatgcgacggtgaccaaaatcagccttgcttcgaggcacttgcatagacgctcgaactcacacaaacagtctagcatgacaagctcctccaggagatatgttccaattaccgtttggacagccgacccgccttgctttttcagtcgagttcgcaactcgttcaccaatatctgccacggctctcgccatccagaatgtatgccaatggacttgaagccacaagtcagctggtagagcccgaggatttgaacgcaatctcactcacgtccgacaccatgaccgaaatccctgatgccaaaaaagcgtcccaccggacattgtcgagctcatcccccaagctgaccccggccgagacggctcgacgcatggccttgatcgcttcacgtcgatacacggagctatccctctccaaatcttcacgccaacccttctgtgatccctcgtggctaatgatcattggtcaggccgatggacatggactcgcctatcaagcctgactcacatcgccttgcgcatggtcccgagtgccaacagagcgtttcgaagtgcggacttgtgaggtaggggtaagtcatcgttctgtagcattggcaagacctgttcttgccacggatccgcctggtgtgggcggcccatgtaatgaaccgcgaccagctacgacgtcacgtcatatttggtgagtgacagggtagctgaccagcaacgcatctccttgaactcaccatgtcctgccattcagactcggccgaggctgttccacttcccgatctcgtggctgcttgactttctatttcccccgaccatccgctgaccacatgctcggcctgcttgcttgacgaccttgaaccatcaggttgagcgtctcgacctccgttggcccgcttgacaacctgacccagcgtcacaagcggagcgtattggcactgtagaaacaaatgtacaagtcagtactatttgatagtgtgggacgacctcgacgggcttgcctcggcaccatatcgttcgcagcgattacaggatggtttggctatttgccgatcagtcttgggttcagcttggagccgctgtgatcgacgggcgtgtcactcactctcatcgcatttgacccgcctcatccggcaagtcaagcatcctgtcctcgttcgacctggtctagtggtggccgggatttcgtgagctagttcgtcggcctttggcatccttcaacagggtccaggttcgtgtccgggcggaacttcaaggcggcagtttgctttacccattccaggtctccctatcgacgtgtgccagtcgttgggaagcaagatctaatcgtcatgggctctgatgacagatgtctggtaaagcagaacagattctacgagaacccgggatgtgagattcgagagacgacgttttgccaaccgagaatctgctttgaatcagctagctcggtcaatttcttccatcccccagagccgcgcgcttcaagtggcgcagtcacggccctcgacgaaaaataggaaaatggtcgataagatcataatcattgaagtcgaatccgaatctatattccgaccagactacgaggatacaacattgatagacgctcgctccggatcatctctgcttctgagcttcgctgatcatggagctggccttgcgtagccgatgcccataaaagtaaaacaccacggggatcgggataaacacggcttcgagtagacccagtagcgtgcctgcccaattcgaacccagcgtgtggtatagcttggcgccggccaatggcaagacggctcccatgacacttctcagcagtgcattgccggccaaagctgaggccgcaaagcttccgtaagcttgaatgaggtagttgcccgagtagataaagacgatggtgttgcccgctccgaatgggataccggcgatcatcggagcgatccaatggacgttcggcgtgcacgtccaggcgaacatgagctctccgacggcgagtagcacaccgcctgcagaaacgatgctcgccacggcttcgggagggggtctacctgtctctggatccgccttgtgcgcgtcgatgattttgcgaatgaggggttcggaaaagatcgtgatcaagctgccgacgccgatgccaccaaaggccagtccggccaagcccggttgccatccccgttcctgttgaaagacgattgggtacgccacgaaacaaagatatagtacgccgtacacaaagccgacgtaaaagtcccagaatatgctgcggagaggcgaggatcagttgagccatacgaagaacgctgtaaatcgagctcaccagattggctcggtgaagagcatgaccagcggtcgactcagattgactttgaggagcgggatgagatccttcttttcgtcatacctggaccaccacctttcgtctcccgtctccttgcgccgctcgaatgccatttgccgaaggatgacgggtgggtacgtttcgcgacatagcaccagcatagccatcccggcaccagcaaagatcaggaccagccacacggtccatcgccatcccaggtattgatacgcgaacccgccgactatgggtccaagtacgggcccgttgatcggtccgatcgagtagaagccgaatgcgagagccaaataacgcggagtagtgatgtcgctgacggttcccgatccgttggtcaacgctgcgctggcgaatatgccggcaaagaaccggggcaagacgagtcccgtgaaattggtagccaccgccgatgggatgatcaggaccaggaagagactgtacgtgatcaagtagatcggctgtctcccgtacatctcgctcaagggtgccaaaaagatccctccaatggccaatccaaacagatacgtcgtcaatccgagcgtggccacgagtcgggtcacgccaaactcttggacgatacccggtaggcccgacgtgtacgaagtactgtacaaggcgacgaccgtgaccatgtaactcagagtgcccaagtggtacattcgcttgtatctcggccattgtctcggatccttgccgtccccatcgacgaatgtgacctcaaagtccggatccctttcatccgggtcggtcgagttgctcttgatacgaccctcttcatcagtttccctcagacctgcaaaagcgtccgtcggcgtcgcatatgtgctgacttgcctgagtagcagctcgccattgagatctggtggacatttccgttaatgaactgtcctctcgcatgcgcgctcgataatccgactcacagtctcgttcgccgtctcgaacggagggtgacatgtcctggaaggcctgatatccgcctccttcaggaagcagaccgctccacgcatacgccgtcatgccatctcttatgaccatcgcacaggcttgcagatcccgtcaccgtcgtccccatctcaccaatcaaatcgccatgtcgctgacctgctgctgaccgttagccgaatacgcgcttgtctcgcggcgagtttggcgagcgagcgatgcgaggatcacaaatctagcgagtttggcgacgatgaccgagccgtgtcacgagttttcatcagtcggttagtcgatcaggcccatgtacgcagacgacaatatatatacgaaccaggttcatcgaggacaagtcaagtgattccacaatacaaaggaaagaccgatatcaaagaattacgcatcctcgcgctcacacccattctagccgccgaatccatcatttcacacacgcgcttcataatgttcgccaccaaaaacttcaactcgaacgtcaccatcacccacattgggaccgcgacagccatcatcgagatcgagggcgtccgcttcttgaccgatccggtctttggccctgccggagtctttgaatcaacgcccggtgtccccttgacacaggtcgaggatcctgccatgaagctcgaggacctgcccgtcatcgactgttgtctggtctcccacgaggaccacgacgacaaccttgacactctcggacgccagctgctcgatggccgacacgtgcttaccacggtcgatggcgcgaacaagctggcccctcggcccgccgtccagggactcaagccgtggcaaacggtcgagctcgtcctccagggcaaaaagtttaccatcaccggtaccccttgcatgcacttcgaggttggcgagtgtaccggtttcatcattgagctcgactcgtttggcaaggcagaggacggtcgtcccaatgccgtctacgtctcgggtgacacgatctatattgacgagctcaagaagatcaaggaaaagtggcacatcgccgtggctgttctcaacttcgggggcgtcgtctttccctttgcctccaatggaggtgaacccaccctgatcacgtttgacggcgcgtctggtgctcagctcttcaaagatatcgaggccgatcgactcgttcccatgcatttcgaagaatggaagcactttgtcgagctcaaggatgatctgagcaaggcgcttgaaaaggccggtgtcgctgagcaaactacctggttgacacgggccaaggaagtcaaggtgctataggcagacgcgattgtagtgagtgtgcgaatatccaaaaggacatgttctgagagcttacccttttccatgttcgatagtcaccgacctacgtcatctaagctccggcacatacctgactttcccgcattgcatgtatcgagacaccacatgacaaccattgtttcgtccgtcaaattatctgctcaagctacggttccgccatcgaaatgaccggggggttccaatcgcaacaatctgtaggaaagggcgagagaacggtcgtcgtgaacagcaacttatcaagtgctgaagtgctcgtgcagtacctcgcagaaaggcaattttactaaattgatcaatccgacatcatctgtgaaagccttttcgatgcctaagggtcaggtgatggtcaccaaggcgcgagctgctccgattcctgactcagttcctctcacgcgaatgagtcagctacgctttccatttatgccacacttctaggaagcccgtccggccggaactaacgagagggaattcgccgtcctatcagtacctcgattaaacgtgctctacaacacgctatatggcaaggaagaatttgaccgacgaacagagactgtccaatacctccattgactctcagccaacccctcaacatgacgccactaaagacaatggacctcatcgagcgccacacggctttgatcgaactccacggacgcttgcatatattcattgacacccgtgcttctgcctagataccctgtgcaaatttgtacaatcgtatcccaatacctattcgactctgcgatgggctcgtaaaccgctcttcgcggccctcaacctccatcctgacacccctcctgcgctcataccctcaaaccggcttgctccgcactctgcttggagacgagcgacttgttcttgcgtccagcctgctcggcgagggtaggtgtgctcttaaacttgcgggcagagatcttgcgctcgtacaactcgtccagctcccagtaggttcgtccagcggtctcggggtagaaaaagtagagaatggcagtggtgggaaccaaaagtccggcccagacgtagatagccttgacgcccaagttggcggcgtcggcgttgatcatgtagggaacggtccactggaagacgacactgtgtgggggatattcgagcagttcagtaaaaatccttttcgatcccacacggaaggccctcacaatccagctccgtagcaacccaagttgaacgaggtggtctgggctcggagacgaggagtcgaagtctctccggcagcgacgaaaccgataggcccggcggaagcaccgtagcacaacacccacaggagcaaacaggctacggcggccttgccggctcccgtgctggtcgaaaacccggtggaagcgagaccgacgttgaagagacacatgaggaagcatcctccgacgagaagaggtcgtcgaccaatgtgttcacacgagatgagcgaggcaaaaatggcgatgatcaggaggacgaagctgcgatgggcaagaggttgtcagctaagttggactggcgctggggaatgaaggattctagacccacgtgatgatggagatgatgaaagggtcggttcctgtaagttgagcgaattgttaccttgtcagcttggaccatctcgtagattcggcgagaagcgggacttataagttggccaaggagaaaaagtaggtcgagtaaccgaacacgatgggagcacccgcggcccattgactgcagatgccaacgcatccggccaaagttcgtcgccagtgaggtcccttgaagatctcaaagaacgaggcgttgccaccgctgaactcgagttcggcggcgataccgtgctgaatgactcggtactcgtattcctgcgagccagaagggaggcaagggtgagacgaatgcccgttcgattcttgtcgatgacaagccgactcacgacatcgtagtcgggcgcagttccgtagagcctgaccatggacctcttggcggcttcgtggttgcccttcctggcgtggtaaaggtgcgactcaggaacaaaccagatcatgatgcagagaagctgtttgaaaacagtccgaattcagtcggtcgatcccggtgcgccggccaaacttggcaaaggtctctcttctcaccccggtaaagacaaactcgagaccgacgagaggcctccacagggtaggctggtgtacggtgaatagctgagcagcgacggcgacgatcaattgtccgaaagcgagggacaactggtacgctccaatcatgaaccctcggatctggaagggggcgagctcggagatgtaggtgaccaagatggactgagcgagaccgacgccgagacggatgacgatggcaccggccaaccagtgttgccacccgttcgcggtgatctcgaggatggaaccggtgaggaggacggcgatggccatgatcatggcccatttacgaccgagacgatcggcaaaggttccagcagtgaacatgcccaaagtcttggacatttcaccgaatccttgccagtacgagacgaccttggcactgattgccggttccccgtcgatgaccgtgtcggccatagtcctgatgaaggcaggcacaggaaggatgttctgagaagaggctcgcggtcagaaagtgatggctaggtaatagtgctggctttgatcgactcactcccgggacttgctgctggaaaccatcgttcaaggcggcccagttcaaaatggcacagaacaagattgccctccaaaacaccttgacacaggcgatgcggctgagcgctaggaggtcacataggcgatctatcgattagccgaagaaagtcgaattggagtcgtttcacagcgacttgcaggcatatttggtttcgaggacctctgaatcgcctccaatgttctcgacgtaggtaggcttttccttggaagcagcttcgtcctcggcgaaagctggcgaacggctgtcggcgtattcgacgttgttgacggtcatcctgtaaatctggaagatggttgttcgatagtcgagcttgataccggtgccgactgacctggaccgatgatgttgacacagaccgccatgacgttggactatatatcttgattcgatcgtcgacgatgtttcaccagagtgagccgagatctgctcgaggtccggaaccctcgcttgatccggggaccagatatgactgccgtcccatggggacccgaggtgatcaaaagaagggagcaactcggagcgttgtccaccgaggttgctgggtgcacgtgagggttcggaagcagccaagcatattgataccgccgctcagtcattcatcgctcggacgggtgctagttcgtcggtagacagccggccggtctgtttcgcgttcgattcctcgctcatggctcaggcataattcggcagaagaactgcataggatccggttgcgtacaactgtggtgacgaagagaggaagcagatctctcgacttctcgagtctgggccgaccgtgatcgtgactgatcttcggagagatctcgcggatatcgatcgggaaacggaggcgacggtggatcgggaacgttcggcatcacgtgatcgaatctaggcgggcggcgaccaacgtctgggcaaggcatagattcgttcatgattggatcccacgcttgaagatgtattgattgcatggggtcagcgcgtagtctcgtcatattgggcggccaagcgcagctggtgtgcaaccaagcgaagcggccggtcgatgccgagatttgagtcccatcgaaacgccacagaatcgaggtgatggccggaaccacctcgctctctcgactcaacgttccagttggtaacgactcgtcggtatacaaccgtccgagccaagtgaagttacagggtcaaccccggtcacgtctcaaccgtcgatgcttgtgtgccgagatagcacaacccctatcggaccgttctgcaacttggccgcacgcataacaagtccttgcgaccctaaatcattattgccattattggcatatcttccctgacactatacatctcggaaccagtcaaacaccttgtcgaacgagacattacccccgcctatgatcacgcacgcgcggatcgtcctgttctcatccccccgttcttcacgccgggatataatgtcgccaacgatctgctgccattctttgcttgccgggctgtcgagagcatgttgaccgagtaaggccgcgacagtcatggcggaggaaggctcgatgatgatcttcattcctgcgcgagagccatcaataggtcaatatcgaagccacacacaggttcacgaccacaacttgacctactttcccaaacaaagcgcatggcccggatcgtggcctcgtcttccaccaaaactacctcgtccacctgtaggaccaatatgttacgaccaatgatcagcattcaatccacgtgacccgaagctgtaccaggtgctcacgttttgtttgattgtgggcagagtcagaaaccccgtagcagtcagtaacccatcgcagatggttcgtgtgggattgactgcggtttgccattcgcccaacttgatggatcggtatgtatcgtcggcacctgtaatcacggacaaggacacagcgatatgcttcggtgacggctgcctacgagaatgaaacgaccaggcttaccgctaggctcaactccgaccactacgacttccttcccgtatatgcccttggaacccaaactgatcccgctgatcaacccacctcccccgattggacaaaggacgacatctggtcggcctccttcagcccagacatccggagtttgggcttgggattcgacttcgaacatgatcccaccatgcccttcgattacatcaatgtgatcaacgaaggaagaaagagggtagttttcccctcttcctgcgcctaggatgtcgataatggtttttcgaatgaatcagcaacgttgatagacgaactcatgagagaatgctctgacatacctttgaaagctcctcctcgcacacctcggctcgataggcgttttcgcaatcgaccacttgggctccatactcgatgaccccatcccgcttgctcttgggtgccgtgtgtggcatgatgatggtggccttgatggtgagtgagggagtcgagaggtttttcgccgaagaggcaatctgtatacacatcgatggggaagatagcgagcccggtcaatccgactgcttggcaggcaatcagcggccagctcacagcctgcgcaaagttcccagaggaatgcgtaaagacgtgtagttccttgggtggtggatttgaagggtcggaacgaagcttgtcgatgtacttgagcatggcattggaggctcctcgatatttgaacgctattgaagataggggtagatcggggaggctcaactcgaaggctttcattgacggtacacgatggagagtcggctcacctccaattttctgtcatcccgacaataacaccttgataacgagtcagctcaagtccaactccgggcaggtcagtggctaagcacctggaagttctcgcacttcaacgcgacctcgaccttgatcgaggcttcccctttcttcccgtcatcgctcgaccccaccgaactgacgccttgactcgctcggtcattgagtgttctcgaagtcagaagtggagtccggttgaccaccggcctgagttcccatagagatctatcagtaaaaccggctgttcaactgggcatactggccgactaactcgagtcgacggaaggcttcccgaatgccttggtacgacggtgccggcgtgccttcaaggtagtctagcgaaggtagcgatgtaggggccatcttagtgtccagcaatgaattcctaggaagccttcagtatgtgtcctgttactgcgagaggtcagaaccctggactgatcgtcgcgatgacggtcgtctttaaagtctctaccttgtccgagtctgatcggccttttcgcatgagaccgaacgggaaagtccgaaaaaagacgggaatcgatcgagacaagagacgctcgacgacggacagctaaaggaggaaagcaagcgggtcaagaccatcacgcccgacgagaaacagctaggcttgcactcctggctaccccacgggctaacctgtgaggagtgctcttacagttagtaccagcccctttcgaactctggacactggaccgcactcttgaggctggcaatgacggagtttgaggactggacagatcgacatcgacaccgtgaagactgaatggaagtgactgtcacgttatgatagtccgcactaaatgcaggtgcaacgacgacgttccaaatacaacctgtgctcaaatagggggcctacatcagccaacgatcgggaaagcttgcacaacaattgcgatctacgaaggttgttctatcgatgggaatcgatcatgacaatcgctacagctatcttgctaaccctggacatgtccagtagttcggataaaatgcagctgatgatcgccctattgcccttgccagacgtccaccacggccgagcgcatgattagcctatgggtaatcgccgcagcggctcgcaagcaagcgatcgtacgtgctgtgatacttcggtatgtcacccaagacggcgactaatgcctgtatcaccgactatcgaagaacggagcgacaattgcctttgtacttcacgattgcgccgctgttgagcgtactcgaatgtactctctgatctctgataacttgcccgaggtcgttttcgcatccgccggcctcttcgacaaggagatacggggcgggacctcggcggagcaactcccaaagggcccgtgtcatcagtcaccttctcgacatcatcttgggctgaactccgtcgacctgactaccgtgatggcaggcgtcaagggagaggctatccgagtataagagcaaggccaagtaaatcgaccataaggcagccaagtcgtgcgaacatccactcttgacttacatcatacaattcgtcatcgatcgttaattcgtccacccccgaccgtgatctgattaatcatccccatcattggctgggaaaaactacaccactgctcggataataactgcccattcacactctcagctcctcgggccgcccactcgtttcatccgtcgacgatggaccatctcaagctagtccaagtcctggctccggcggtcgcgctcaccacctcgggcggcatcctcgccttgtcctactacacttcccctatcttgcgatcgatcacggcgagatctaccccggattcggcggcattcgccctttcggaactccgagcgctcttttcttctggatcacacgtctttccgcagatggctactctctcggcaggattgtcgacttacctagcgtggagctgcccagaagcccgggctagctatatcggggcggcggtaggggccatatcgatcgccccgttcaccatcttctacatgctccccgtttgcaacggacgtttaatcgagctggacgaaaaggccaagcaggacaagacggcagtgagagggaagggcaaggagcgggaggtcttatatttattgagcgagttcgagaggttgaacgcgatcagggctggattgttggccctaggagggttgatcggattatggaccgctctgtcgtgaacgaaagtatcccgggctcacatgcaggcctgaggcatcgaagcgaacggcagacaagggacgcctgtgtggtatagcgtcgaccccggtgtaatcgtatccggttagatgcgaagatgtaatgatagaaccgatagccctggcagaggcgagtagcggtctatcaattttgacattcttgggcttgacatgcaaggggaacgtccttgatactgcctttcgttggccatattagcgggactctgggctgtggactgcgtgtcctcctccgctgcgagagacgaccggcgccgttcgtatcttcgaggtgcttgtgatggcccggtggaggtctcgcttcgatctgttcataccggtaggatacagatggcatcactgacaacgagaatcagacggcctctcaactgtacagtcgaccaaaccagactgttgcctttaccgggctcgtccccatctctcaaacgcatgaggcccgggtgctaacgcggcctgggtgcaacacgtcggcattatcatgtatgcaaggccacttgggcctcatgcgatgaagagccgattgcatagaccaaatcgaaggaagtcccctgttcagattcgtccttgctctcctgactgggccgactttccagcgcttcgtatggcgcctcactagtgcccgaggtctcgacttagattgattgcgctccacatgaacctcgagccggttccagatatatagtaggttatccgtactgcaacacggatccagcttatcaagagctcctcctcgaaagaaagtcatccaacttgaatcatgtactcaccaccgtcatatcaacgcgtccccgcgacctcgatcgatatcccgctggaagatcggtatgccaagacgcggccagggcaggaagattcgactttacgcctgcagcaggacgccgagggcagtaagggccttttgaggccgacccgatacacctataagcccgagaggccgatcaacggcaatacacagagcgtattgggtgaaccggccacgacgatcgaggtgagccgatcttggtcgtcaggtataccagtacggtacacgactcaaactgatcagatcggcctcttcggcaaaggtcgtgctggcttctgttagacaaaactttgaccttctagaccacatcccacatgaaaggctggagttctttgcggatgacgccaagatccttgattcgacttggaagtatctcgcacgacatccgccagaggtcgtgacggtccgggttagacgcacggaggaagaagaacggcttgccactcggcaggaaagggacggtaagcagcagagcaaagtcaagtacgagtggtatttttggcttatacacgttgcccatgaaccacctaacaagagatatggggccacattcggatcgccctggcctttacgtttgggatttgcgggcttggcggcatcttcgcctggttagtgaatgctgtggtggcaatgttcagaaaggatgcatagccagattgtacagcatacgccttatttgttgtaatctaggccgtagacacatcataccacactctcgaaaatgcttccagattcgacctcagcgtagaatgtacttttgtgcaatgtttaaagccgttcatattcctgcctgaccggcatgacgcacgcttcgatgattcgtcggagactacctatccatggccagccggttctctccgtcaaggcaccaggtcgcacgcgtgtcgaaaccttatatctgcaggcttacggcacgtgcaccaagtccctgttggaacggtagtagctgtcctttgaccccgcgccgctgtgccttggcagccgctgggacgggctcgtgttttgcccctgcgtccgcagcgggacggccttctcagcgagggagaaatctagtgacgtgacggcggtgtctatctcgcatgtctacgacggcctttgtggggacacgcgagagggtcgggcccgtctagcatttcctactttacgactgggttacaactcctcgaaaagggtcgtcatcgtatatacgagtacatcactagaagtgctcacggaacgtccccgagagtaccgaacactcggctgactagcacgttatcgcaaagcctcgagatagacgagatgaatcaggatcatcaccctgaccttgtaccacgtccactgaacgcgaaccccttgggtctcccgagttcatctacgaatgtgtccgaggaggccgctccagtacgactacagcatcttagcagattcttggcttgtcagtcgtgtcggtaagtgaaggtccgcctgggacaacaagaggtcatatctgatctttatatcgactggcttgtttggcctgttcagacgaagaaaactggtcagtaggcgtgtgctgaatctccgtagtccatccgattcgaaccaaatcgtcacacgatcatttcgcagcgttgcgatgcccagagacccacctgcggtccatgtctcaagcgtatcagttcagttgccgaaaatgccaaatcagggcacgcggtgacatcgccctcggagcatgacctgtgcgtgtacgatgagcagataccgaaaaagaaacggacggtcaggtcgtccaagaccatgggacatgtgcctgaacggcaagaacgagggcatcaagtggccgacttgcaggacaagataagtaagcctgtgatcacgagatggcgtggtttactggaatcatactgatcttgaagcctcggtcttttaggaatgctggaacaacagttacaagatctgaagatgcaagtccccggatcgagctttgaagcgccaacaaaccaagggagacgagcaacattcgggacatcgaccgacagttctcctggataccagggagcatcataccaatcgtctgtgtcgcccactcctccgctgacaggtcctccatatggtcaaactagtttcccccctgttgcaccccatcatcctgtcgcggattcccagtcgatggctcaggaggctccatcgattcttcctcccggaacttcagcctatagcgaggtctattccgtgaacggtgtagagttccccgtcttcccgacgacagatacgcaggggcctttgaacggattttcgggatcagcaaatatacaaccgatgcccaagccggatatctggggtttgaatagtgttccgccaccctcagttggcttcaattggttccaggcggtcagtctcgagtggatatcgtctcaagcggaagtttctgaccagaggcaggacatgaacagagagatttcgttctggacgagtcgaatacgaatcgtgcggcatatgccaatatcaacctgaatcatcagctccaggccacagggtgagatctgtcggcgacacatcgtgggatttgactcactcttctatgcctgatcctctgcttggaacaggtattcgacaacccttcctcctgttgaagttctacacctcctggttaggcgctattttaacaagggcaattatcacgccaagatcatggatcaagggaggttttggcaaaggctcagtctacctccgacgcactctgattatcctgtgagccaagtcataccggcgccgtcgtgatgtaacaccggtactgaatatttgccgtatccatgcgacagtatctgggaactttacacgcgatctgcgcagtgagtaatacgcatatgtattgatctacgatcctcattcacacatcaaatcgtccggcaggccgcctcacatttgaccgcatcaacgggcgtcaagaggagaccgccaaaacccctcaatcaatcggaattatcgtcggcggtgactgaagccgaggtgtatgatccttatgacacgggtagtctcgcattccgagatcatcatgctcggctggcgaacgctatcattcaggtcagcctggcccatacgcatcccttgtacaacgtgttggaaggtgagacttggctcggcccgccagagcaacacaaacacgcgacgatgttgacgacaaaactcttgatacatcaatatcagccatgaccgtactccagtatcactggatgcacgaagcattgtgagttgttctacccatggagatggtcttcgggttatcttgctgaactccagagatttgtctcgtcctagcatcgccaaagcctggattacaccaggaatgatagcgtccttgtcgacatacctcgcactcaacgaacgtcgactccctgccagagcggccaaaatgaccgctgtggatatgcgcgacgcagacatggtgttttggatcggattttgtgacgaaaagatggcttgtgccatgagtagctggccatcatcatatcgagaggaagatatcacggcgttcctgcctacttgcgctggaccatatgtaagtcgaccagatcggccgagcggacgcatccagctgaaacggcaagtaatcgatgaagggcgaatatctgcaacccgttcagtggatgggatcgccggatctgtacactcatcatccggtgcaacattgcgacgttagtctatccagattcgttcgctttcgggcttaccgctgacggttctcgtggtagagcacgatctttttcatcaaagcttcaatcctgttatcgcgcgtgcacaccctgattcgtgattccaaaaaagctcaattgcaagggtacgctactgaggaggaaggaagaggactgggactgacacattctgctctcatccaggatcggcgtctcgcctcaagctttccaggcgcaaaggatggacattgatagtttccttttgagcatcccgcgctactggaaaacgctcttcaaacaagatggcgtggatttcgacatgtttctctgtttgttaggggcgcacatgtgagtaacaaagccatacgttgaggcaacgaagcgctagatactgacgggcttagaggaatgtttcagagctacgatacacatggcagaactggtccccctggtagatccgcctctaccacccatgtacaacgcaggcgcgaccgaagcggcgctctctgttctcgggttagctgaggctcgtcagttgacgagaggccgataccccatatgataagactcatttgtacactttgcccacagtcatcggcacgtcactggactgtgggttttccatgaaggtcgaacccaaatgcggtcgacgacagctcacgattctgcttgactacagtgcgggtcttgcccatgttcgttccctacgtcttgttccagtcgagccgggtgatcgtaggagaattacagcaggctttgttccgaggcgatcaggcagcagctgcgacatatgataccgggctcacgactttcgggtgagtcccatcgcaccaaagatccaggacccatctgacgtctcccccatgactcgatagtttggcgatggatctctgcggagaagagtacagccagatgttctccctcgtcgatggtgttcgcgaacacgcgcttgctgcgaatcgtatgaccgaacttgccatgacgtgagcaccgtatccgaatcggtcgcatgcgacgtagctgatagcgatgatgcaggtacgaaaaagtcgtgacgggagaagctgaagggggcggagtcattgggagatcggaggttcaattgcccggcccgttgatacatgtgacgaggtagcgaatgtgcaatgatggcattggatacacaagcttcgagagccatgagctcatattggagcatgctagcggtctatggttcagctttgcgaaacgaaagcttcccctcaactcaaccaatggcatgtccagcgggtctggtggaagatcttcgctccctgacacacttgaacagatcaatgtgcatcctcctgaccgagagcgtcccggttctgtcacctgtcaagtctcgcaaagagcctctcgtgccttctgttccggttgttacgatgctccaccaaaaggcctctagagcttgctaatggtaggtgttacgaatttcggcaggcggatgatgtgacgtgccatgagtgtgagcagaaaacaacgattgcggcctacgtcgtctcgaccagcttcatgatccacgaggcctgaggtttctccttgaagtcgccgacctctagttgagcagactctcagtaccgaactacaggcggcgatatttacaatcaatggatctgcaatgcgagcgaccgcctacagcgcgtccttctggacgagatctcaagagaccgtaatacctcctgtaccgctcctgtttttcgtgatgcggagtgcgacaaaggttcatcagactggtcatgagcgccaggtgttggactctatgatgaactcttctccaaattcgcagtcatcgcatgcaatgtcattttcaggcacaaatccaacctctcggctgcggctgcgtcgatatacctgttctgtctgtttccccctctgacgacccctagttcttgcccatcgcggcctcgacctgccgagtgcactccttgaccaacgaccccgtgtccgtgcagatcgataccatatcgaacccttggtccagacgcttcttggcctgttctcccgacacgcctgcgagtcgagcatgcggtgagatgtcagccccgggtgcatgagtggtatactgtgacgagaggaagagacatgaaccgactcacagaagatggccgccttcttgccattatccttgcaagccttcaacgtcttggcgatggcctcttcgtgctctttgcccccgaattcaatgtccatggacttggccaggtcgaacggtccgacgaacaagacgtccacgccgtctacgctggcaatgtcgtgcacgttctccacgccggagcgggactcgatctgcacgatgacgagcaggttcgagttgcactcgagctcgtaagtacgggattcgaccgagaagatttgatgggtaaagggggaaccgcagcctcgggtgccctggggtgcgaatttgctcgatgagacgatggcacgggcggcttcctgcaagtcggtacatggtcatcagggggtgagttgtcagttctttcccaaacgtgtcaaaagatcgataccagatggacaggcttacagcggtatggcacataggggtcatgatcccggaagcgcccgaatcgagggcacgcttgatcatccaactttcgtccgaagggattcgaatgattgggctgattccccggttggtgatggtgttgcagagctatcgtaaattccatcaatatgatgtgacgacagcgcgggatggatatctacgtgctcgaacctacgtcgtagtaatccgaatcggtgatctggccgtgctcggcgtcgaccaacaaccagttgaagccagggaccgtggcgatcgtctgagccaggaaagacccacgcatgctatagacaagacgaatccaaaaaattcaatacgtcgacaggccatattatgaggggattcgtagatggctcacgtcaaccacatgccgatacccggtttgtcctcgctaagggcgttcttgaggtaggtcctgttcttcataccagaagtgccggacgaggcgggggcgttgggagacgagtcgtaagacatgatgtgttgcttggctgtatgtttgatggacagaggatcgtatgtatcttgattcgtgtcaagatgaatcgttgcacgaatgacatgttattgtaggtggatggatgacccctatcctctcgttcgagtcgccccggctcaaagcaacaccgaatcaggtacccgccagctcaaacttcggaccaatttcgtccgtgatctccgatgaactgggaaaagggggtggccatcaacaagtcgcttcatcagctcgagtttagacgggcaatctcaacatcgagtacatggaacacctgccacttgtcgctcaagccaggggtgtcgctgttaccctgctggacgtcacagtgcgaccgaccagaccaggaccgacccgatcgagactgaaccctcacgaacgagcaacgccgaggtcacgcgcgcggggcaaagatgggcatcgagcgaggtcgaattcgcagccatacaacccaggtctcctcgttcatgcgagatcctgcatacaactatttcttttggtttcatcttgtttcatcccatccttcgcgtctttgatactctgatcgccgagtctcatcgcatcgtcggcatcgagacatcggcccgcgagttgagggcgtcttcctgcttccagagcgaagtgactgtctggttctgggtccagaagtcgatgcccctggtgtaccgaatgtcagccgaggcagcgcacgggaggaggaatcggcggcgaactcacaatttcccgtacaagctgtgtccgccgaggacgcttcccttgttcccgctccagctgaacatggggagtgggacggggatgggtacgttgacgccgatctgacccgcctggatcgtcctctcaaacaccctggccgtggcacccgagttggtaaagatcgaggaaccgttgccgtacaagtttcggttgaccagctcgatagcttcttcgagcgtctcggcgtggaggaccgtgaggacgggtccaaagatttcggtcctgtatgcgcgcgggcgaggcgagtgagaaacgggtcggcgccgacgcctctgcggctactcactcgtgacacttcatcccctccttggcctcgagcacggtcggtccgacccagttaccctcggggtacccgtcgaccttttgtccgcgtccgtcgagcaggatctttccaccttgttcttcacacgaggcgatcaatccttcaatcttttccttggcggcgggcgagatgacgggaccgctgcgggtcggctaaggtcagcaagttgcgcatgcgcctaaccatacggtcgcccaacactcacaggtcgattccttcatcaaacccgttaccgaccttcaacccctttgccctggtgatgagctcttgcacccactctttgctatcgccgacggtgaccaagacgctcaaggccatgcacctctgtcctgcggctccgaacgctgctccggcgatggcattgagggcttgctccttattggcgtctggcatcaagatggcgtgattcttggcccccaaattcgcctggacgcgtttcccgtgtttgcccgctcgatcccagatgtgtttccccgcggcgtcggacccgacaaaggagatggccttgatgcgtgggtcgtcgcacaagaaattgaccgtctcaggaccgccgtggacgagcgagacgacacctgaggggacacctgcacgggtggcgagttcgacgagcatagccgccgctccgggatcacgctcggaaggtttgatgaggagcgtgttaccggtcccgatggcgatcggtaaagaccacagcgggatcatggccggaaagttgaacctgtcggccgtgatcgagtcgttgttagtcgggagcgggtcgctacatgcaagacgtaccgttactcacggacagatcgcggccccgacgcccaacgggctcctcctcacatacgtatccatatccgtcgacacctccaacttgtcccccgtcaacatctgcggcaaggcgcacatcgagtctaccacctggagacctctaaggacgtcccccttggcgtctgcaaacgtcttgccttgttctaggacgatggattgggcgaggtcgtcgtggtgttgcctgatgagagcttggtatctggtcgggcggcggcgcagaggtacgagcgtgatactttcggggtcagctcatctcgtctcatttccctttctcgtgccctgtcaagcgatgcccaacgcacttgagcatgatcccctgtcgactcaacaacgacgtcttgctccacgatccgaacgcttcgtgtgctgcgtctaccgtgcgtttgaggatcgacgtgggcggttgagggactttggtcaagagggtttgagtagactatcaggggtcgagcggcggggggcgcaggcagaggaggtatcgttcagtatcaatccgactcgactccggatgatatcgcctggcatgtatcatcgcgaacgtccgcgactcaccggatccctgacctcgaaccacctctcggcttgatccccgacctcgacccattgacctccgatgtaatgtttagtctccccgccgtcggtgcacgtccctgcccatccggcggattggtgtgattcggctttacgttgggcgatgttgctcacccggcgagtgagggtgggggtggaccgggatgaagtagggagggcgagacgggatggtttgatgagcatggtgaagacgagctactggctgtgatggaggtgtgctggtggtgatcctgatggcggaggtggtggtggtggtggtggtcgatggtcgagtgtgtgtgtgtatatatgttcgtcgaccctgttctggtttagaataaccggaattagccggagaagcaagaggttgtgtggtagagtgaggttcaacggtttggttgggtgaaaaggtgtgaccgggaacgatccgagcgttgatgtctccctgcctactttatacgaccgagtacgatggtcccctaacagacgatgatgttgtgtcccccggttgtggtcatgttctcggtcgttgacggccgacgacactaggtcgtcggtcgttgtttcggacccgccgaagggtcggtcacctgatagcgaccagcttatcgggataaactgttcaagtcaaggatcaacctcgacgtcggatcgtctcgttcataatcatagcaagcacagtagtagtgtggtgtctatatcaagctgcttttgacaagaacaaacccgtcctcgtcgtcgacgaccaagcacccaacaacgactgtgaacgatcgaccaaacgaccaaacacacgcaccaccatgtcactccgactcgtccgaccgacgttatcgtcatcaacatcgacatcgacgacagtctcccgtcccatctccacattgatcttcgcctccaaatcagctcgcagaccacacccccacgtcgccacgaggagatcgatcggttcgagatggttctcctcgacagacctctttccggatgaaccccgcaagccgaacgtcaagaccgacaacgttccaggtccaagaggtcgggagatggtgagtcccgccatcggatcgtcggtcagactcggcgacgacaagacgtccaacggcatgtcaaggaagagaggctgacttggctatcgattccactactggtcgctttggacgacctcccctgaacgtcggtcgtaaacccgtcaaacccgaaccacccgttacacctatatctcgctccccttgctctctctcctcccaacatcgatgccgtgcgccgactatcaatagtcccaagccgtctcccacttgcaagacaaccgcacccacatcctcgtctgcgactaccctgcctcccaaggcaactacctcgtcgatgccgacggaaacaccctgctcgacgtctttgcccaaatctcctccatcgcgctggggtacaatcctccccctttgctcgagctggcgaggacggactcgtggatccgagcgtcggtgaatcggccggcgttgggtagtttccctccggtcgggtgggaagggttgttgggcgggttgatggcggtcgcgccgagcgggttgagtagagtggtcacgacgttgtgtgggagtagcgcgaatggtcagttcaggcagggacaataggaatagattgacgagggagacggcgctgatctcatcatactcgatgcttttttctcctccccggtcgctatccgtgcgcccgtcctgaatgcttggtcatggggatcgtgcacttcaaaaccgaccttctttcttcctcccggcattgatacctgcctgaatgcttggactgtcctcgcctgatatgcctggacatgtcgtttgcctcgtcaaccgaacctgacccaatccttacgacgataacgatcacggtcgctcatacggcatgccttccgacatgatatggcatctggccccccggtcctcccgttcaacctggtagaaaacgctttcaaggcggcgttcatggcttaccgggcgagggaacgagggcaagaccaggcatttacgcaggaagagattggtatgtgcctcggcctcttctgtctaggccatcgatgactcacctcgatgcgctccggatcagactcatgcatggacaacaaggcacccggggcgcctaacctggccatcctcagtttcaagagcgggttccacggtcgaatgctagggagtctcagtgcgaccaggagtaaagccattcacaaggtccgtctgtccacgcagcgtcgaatacggtcaaaaagacctcgactgacgacagcgtcgtgcgctgcagctggatatcccggcgtacgattggccaggagcggattttccgcaactcaagtaccccttggaggacaacgtcgaggccaacgagcaagaggaaaagaggtgtctcgagcagtacgagaggatcttgatcgagaggtaagtcgtcgtctccttgagcctcaaccacgcggccctgacgccccgcggcgaccccgcagtaactcgacgaaaccgatcgccgccgtcatcgtcgaaccgatcttgtccgaaggtggtgacaagcacgcctcgaacgactttttccgtcagatccgtttgatcgctaaaaagcacggcgcgttcttcatcgtggacgaagtgcagaccggcgtcggcgcgacgggcacgttttgggcgcacgaaaagtgggggttgaaagagggcgaagaggcggatttcgtcacttttagcaaaaagatgcaggccgctgggttttaccacaagccagagaccacgcccaacgcgccgtacagaaattacaacacgtggatggtgagtctagaccgactttcttgcggaactcatgcacggctgacaacgctccacctcgcgctgcagggcgaccctatgcgggcgatgcaggccaacaagatgatcgaggtgatcaaggagcacgacctggtcgcacacaccgccaagaccggtgaccgcctgtactcgcacctcgacgacatgttcaaggataaaggccacgttgtcaagaacctccggggtaaaggtctgggaacgttcatcgcctgggatttccacgacgccaagacgagagacatgtttgccgcgacgatgcgcaagaacggggttcagatgggagcttgcggagacgtctcggtcagactcaggccgatgctcgtgttcgacgaccgacacgccgacgtgttggtccaggccatcgaaaagtcgttggccaaggtgtgaagagcgtacctcgtagcataagattcgataccgagggatacacgagaaggcagtgcagacatcacaggattggtaccgtctgtataaagtgtcagcatgatcgacaatcaatcaatcttgtcatccatcgaacagcctgaggcagactgctcctgtgtgagatcggccgcccaacggacagaccgattcgacagggcgctgatgtgactaccgtcgcttgcgattgatctgatggcggggtgagtcggcatcgacggatatctgcttgttgcgcctctgtcataggttgaaatcctgccattcagcaaggtgaagcctggggaatcgcgcgagctcggccgtgcaccctcgactgtaggaggtgcacggcccgagcaatgttgtacgactttgtcataatttgccctgaaccaatccctaagctcgtcgtagctgtcgtgaacacggctttcaatactaaacttccatccggagcgctgctccgtctcgccatcgaatcccgcatggtctcgggcataccatgtgcctgtgacgggatctttcagtcctgcattttcttcttggcttgggtcgaccttcagatccacgcagatgttctccaccaacgaaaaatcgacggggttccttgtggaacttatctccgtgaaattcgcttgacaagacacattttccaagacaaaggtctcaatcatgattcgtaggtgaaaaaccaaacggttctagaggtcaagccctcggaaggaagatgttgtccacatgccgtgccttgatccgcttatatgcgcgtagtttgtcactttcggaagctcgagcttcctttctccttgtcacatgataggtcggatcctggaatggtcgcgcttacgtcgatccaagaaggggcttcccgggcacgacccacgacattccgtcgagtgacaaatgtaacgccgagcctccgtggtgcacgatgcacattatcgcccccaagatctcgtgcttatggtattagagaaagtactcgatcgtcatcgctttaacattcgatgagaatggcaacggtcagattccgatcacggctcttgatgcgacccagggaattcgtcccattcaggagtcccgcaggaatatgtttctttgttcagcatgagctgtcgaaggctacacaaatgcctcgagaaacaatgtatggcagaagggtacatcatttcgcttacaggctgttcgctgtgagaagcttcgatcgaatcgactgtggactctctaacctcgggctgacctgatcctggggcgacccagtatgcttgagatcgatcgatcaactttgagctagaattccatcctggcaaccaggaacatatcgtagagatgaatgacctgtcatcgttctcgggtgaatgatcggcctccgatgactgcttcaaggctacctttccagccacgagaacttcgtttgctgtaatgactacttggtggtccaccatcgatctcacattgtggaatttccgaagtcatgagttggttatcgaggacctcgcggcctaggggtgcgtttgagacgtgaatcgtaggacaaaccgagcgggtgatcgtcgcaaactcatattttctgatcccaactcggtagtccatcgtattatatacgctcgtacggttacgaacatgctgagttcaagcgtgagctgcagggcttgtgacctcctgtcggctcctttgtcgacgtgtcgagtgtttcaggatgaacgacctgctatttccctggttcacgcgcgtcgcgccggtacaagctctacgaagcgaatggctagatccccgtgtgattcgtgttcgggagtcagaacaggagcgtcccaaaaaggacagtcccgatcaaaacacctgataatttgctacagcccctttcgggtctatttctgtgcggtgagacggttgtatgtgattgtaattcatgggattcgatgccgtggggtgatttgcaactcgctccttaacatcatggtcgcaaaggaagtggaaccaagagcggtgtgcttatacatattcaactggctatggttgatcgtggtagtgtccttcagattggtcccagaagtaccgatgtaccgatgatcaaaccgggacaataaatgagtttcgcctggaggcgttcgccttgcacaaactttacgagagattgcaccacaccccctcacgtccattcgcgattgcatttcaaaagacacgtttgacactgcgattgggcgccaattgaacattaatacggataacaatggcgtatcacaagcaatcagaacagcaggtacacacatgacatgctgatgccgacgggcttgatcagaaacggcattagatagtcgtctcatcgccgttcatgtcctcttgaccctcgatactcttgagcgctgtcgccactgtgctatttggcgtaaggaggctctgttcttcctcttttgcggcgctcgtcgacgatttgggcttccttccccacttccataaggaccgacgggaggaattcccggtgccatctggagcctcgaatgatcgttgggtattcccgcagactacctccgtcttttgtgtcgtgttgtcccaggtcggttaaacagcgttgcctgtcaaccatcttgaacattctttctcctgagcatgttgaaagctgaaaatgtagaagatggttccacatgtgagactacggtagtagaaaccgatgttcatatggtctgcaaccatagtctcgacgctcccgacagtcagactcgttcccctgatgatgcactcaattcccccgatgacgtgttggtgcttttgaatttcggtcatttcgaatgtcgagatcgggcagagtattagttgagggggaaacggcgatgggctaggaaaacgcgagaatagaaagttatgggctgcaggcgacgagactctttggtatatactcgagtaccgcccaagtttccggtgccattgtcaaggaagcacccctcctttcttggacgttatcgcacgcggatttcatgtatggcgtgactcgatggtcacattactcacatatggcgatagtgacgagcttctctggatctgattgcagatgatcttgatctgagcaaccgaactcttaatctatagcaaggcttctttcgtgacttggcacctggcttgatgtatacataaagctcgagcgatcgcaacgtcttgtacggtcgttcaacacggcaagattcattttgttggctgtccttcctaggccgacgccgatggcctcaattgccttgacgggtttcaccgcgaacgtggaaggtctcacatttgggttcttgaacgcgtcgtgctgtcatcagggtgcatcgggatacaatcgtcttgcgaattaggggaaacgttccgatcgttcgagaggcatagtggccattgagaataactctgggaggtgtgaaacgatcatcacaattctgcctacgatggatcaatctacaaattcgaaagcgttcaatcggtgatttgatatctccgccgccgacagatcgacagatctccctcacaaggtcaaacttgacacgccaacgacagttttccccgcgcatctgatcgaagaaagaatccgatacgggacggctatcagaactactgagacctggtcggccgattcggttcacaaagcgttccgatcggtggaccgggatactctcgccgtgcgttgcagattggtcgagcagcgataccaacagccggtctttacttgtcgaccatggtccggcagcttggctgcggacgtagcgatttagaacataagctgtgccgacgatgaggaccattcgacgccggctcagctaggcttccgcgtcattggcccctggcccctgatgatatgaggtctgacttacatggaggctgagacgaaactcgcaacactacgccttacacctcgagctttattcaaccagaaactcgtattaagtcccaaactttccaagcactacattacaactatcgatctggctgttcattgctatcgaatgccccgtcctgtctgatcgtcacactagattttgagagacgcccacgtccacgcaactttcctgcttgatcggatcgatacgcctctacgtgtttcccgacaggctcaggtgcgaaagagatgtgttcacactggtgttgtcaagaggaactgagtctcgatcagatccttcgggcttcgcatcagaatcctgggccttgctgacggaagactttgaaagagcgatactctcggtaccgtcaatggcgagtggctttccctgaatgtagacgactccgcccttgatatcaacttgatgtttttccagccacggaaacgcaggcaaaatgtagttgccagggcgccaatcgtgaacgtccctcctctccccggaagggaatgtgtaggtgaaaggaaccggcacagctttgcggcgggaaggctccccgatgaccagttcttgttcggacaagacgcactgcgagccgtcgatcgagaaatacactttagaacccttggcctcactcatgatgattgtatgtaagacggaaagaagccggatggtcaagcgatggttgtgccgaggaaagatgatggagtcgcaccagtctgcgcgcgcccttactgattgatgtatgtcgtcccgatgaatcatacgcctatataccgcgtcaaaggcctagaatcgtttgcagctcctttgttcctgtaatcgtcttggcaggaccgcctcttattctcggtcacgcctgatcacgagtgctcgactacaaaggaacgcagttgggctgccgatggcgaaggttcgagaccactagtactgcccggagcgctgtgggcctgtcctcgccgctcctctagatataccctacccgccgtctcctgcattgtcgtaccacagagccgaggcgcagaaccgagaagcgagacatcaagttgacatccttgccgattgttcgagctgcagtaaccctctggccggaggtccagacccacaacaggaagtcgattgccccctttggtttcctggcatccatttttgcatctgcacccatcgcccgccttgaacttcaactcgattcgcatcttttctccgtggatcgtatgttacaatcgacatctcccgacctccccttttcgctccatcccagaaaggttccctttctctgccgctgaccaccttgtgatcgtcacgctcttgctatctctccaaagcggatcggccgtcgacctagacaaggacgcggacttgcacaacggtccgtctaatgagccgaggtggctgcctctttctcggcagcagagaacataggaggctgttttccgtcatgcgcgacgatgcgtgtgtgacgttacgtgacggcgatatcgatgcattcgaggtagtcgggtatccggggcgtgtcgacgtatttgatgagatgataggaacgggtgggatgaattcgttggtcgatgtgcaatgggggtgagagaccagtgaggtatatcaggggtaatgggatgcgcatggagtgagcgatagatccgtgcccaggtgcggtgtggtgataacgaagatgaaggatgaggtgaaaatgtatatcaaggagacgaacgaaatgaatcagccggactgtcaccaacacgaggatcccgataatacgagtcgagacgggacgagtggaaaaaggacgtcgatggactcacgggcaagtttcgttcccacttggttccatcggggtaaagaggcgctgcaaagacacacctcggggggtcaacgaacgttctcgcacaggagtagaattgcaagtggacgaccacagataggcgagggtgggactcaaactcacgtcggtaaggatcgggatgttgggtgcgttggagttcagcttctgcccgttcgaagaggacggccagggctcgagggtcggtgacgtttctgatcaggggtggttagagggtcgtcatagaggaatgacatgtagggaggtcgaggtccgggtagagacgggtggtgtagaagagatgacggggcatggcagggatcgacattagtgagaccgtgcgaattagactcccccgacgggctccccctcctcccgttcgggactcaccggttacgctcgaattcggccctgatctcaatcgccttgttcctccatagatctcgacggatgtaccagttgagcgagttgacgagggaacgtttgtagagcgacttgacgtagagcctgtggtgggtcatgcacgagcatatcgttaatggatggtcgtcaaagaggtggtacctcggtgacgctcagaggacttgcctgtgtgcgctggtgaaagaaggagctacgctagacatggtgagatgtcctagtaggttcgagtgcgagtgtttctatcgtctaccgagttgcaagtcgacaattaagatggtggatgtctaggtcgcaaggttccatttcaagatggatggtcaacctacctacctgaatggatggtcttgttggtcggttggtacttttctttttacaactcacgctcgcgcgggctctcacttggctaaattaaaaatggctgaagctttatttatctaatcatattacgtaatcacgtttccatgaccatattcatcatcatcgtgttgactcttttcgagagtggttgcatgctgttgatccaatcccatacctcctgttctatcggcaagtcaaggcaggtgagcggcagatcaagagatccgcagagattgtccaagtaattcctcctcggatcgtcgattgatgtcacgcgatcggttgggatctcgaccggcaaccggttcgagtgcatcaggctggataatccaggggtgcttgagtgtggatgtcgcggatgcgacctgcaggatcggtggcagatcgagcctcgcgggaacgcaatcagatgtcattccgaacgaccagttgtgcgagccgagatacgccaactcgctattcacgggacttgatcacgccgataagggcatcaaagcctctaccaatctcttttcagacgacaagcgcgcctgattcctgatgactgccgtctgtccagaactgttcaacgagcttgctgaaggcaaattcgaccaaggcttgtcgggaaaggtctccacgagatgacaacacatgcgggtttggacgtgcgacgtttccgaccccaacgacggggcggaatcgaggaaacatacggatctctcgatatctcgtctttgctgtttacaatcgctcgaaccgctgcgcttcgcactggctctttacaaatatattccccaattgcaattccacgtctatgctcatgtctctcacgccttgtgttcgagctcgacgtgctcggcctgctctttgagatcgttaccatcgagacggggcatcgtgtcgtcgccgttcatcctgtcgggcagaccgctcttcgagaagatggcatcgacggcttcgagcgtgaggcccttggtctctgttcgtacggcggagacggggaggtaaagtcagtcgatgcgtctcgtcgaaaaggacactggatacataccagggaagaacatgtagataatgggcacgaaagaagcgttgatgacggcaaagatctgaatggcgggcaagggaggggaatagaaatcagctcatgtgggacacggatgtacacgacgtgcatctctcggctacttacgatgtagtacttgtacttgatgctgacgatggcgatcggcgtgatccttcagttcgcataatcgacggcgagtagggagaagtcaggattatgcgtctggtcacgcttcaggtgctcgctgtactgactggacaatcatgtagttgatgatccagttgcatgcagtcgaaatggcgcttcccttttgtcgatacttcaagctcaagatttcagaggggtacacccaaacgacctgaagcggagaggcgatgagcgatcgcgaactgggtggcttgtgacgatcaccgactcacggcttggaaaccggtggtgaacaatcccatgtagacaaagaggaccgcaacggctccgataccagccgacttgcccgtgccgttctcaaccttccaaatgagtccagcttcggcggcctgtagttggagaggccatggtcagcgattcagagcgagtttatggccaggatcgacgcgctcagacgactcacaaaacaagcggccatgagagagatgcagacgagtagcaagcgacgacgaccgatagagtcgatgaggaaccaaggaatgaacgaggccaggaagaaccactagcgatgcagagaaatgcgcaggccgtcaaccacttgcacccagcgcgttgacatctgaacgactcacggtaaagagaattcccgagacgagactggcgccatagttgctaagaccggtacgcaagagcaaggttcccgagtagtagatgataccgttgataccgccgagctgttgcatgatctggattccacaagcgatcaagaatcgctttcggttctgcaagtcgtcgtccttgagcaacgccttccagctgcccgtgccgatggcttgctcgagttcgacagtgcccataatgtcttcgtactgttgtcgaacagccacatcgtcgacgtccctacccattagcctcgagatggatcgcagcgattcctcctgtttgccgtgggcggcgagccatcgggatgattcgggtacgatcagggtcaagagcccgatagggacgataaaggcgcattgcaaggcgacgggaattcgccaggcgatcgagcccgagacgttggagaatccgaacccggtccagtaggccaagaagattccaaaattgaggcacgagagttgagcggcgaggaagcggcctcgagtggccgagggtgcggcttcagcgaggatcacggggcaggtggagttgatgaaacccatgccgagtccagagacgatacgtccggctatcatgggtccggtgctagagactccggcctggataccagctccagcaagcatcaagagggcacccacaccgatacacttgcgtcgtccgagtcgttcacctacgacagccgtggcaatggcaccgacgcagcagccgatctcgtactgcgatggggccgagctcgacattaatgatatggtcaaggggggtaactatcgagcatgtacttacgatggcaacgattgttcccaggagagacgggttctcgccattaggaaagaacgtgtcttggaactggacccatgcggaaccgatcatgagtttttgaaccaagctgcgttgcgtttgtgaaaactcacaggcttgtgttcgatgataccgcccatgacctggttgtggaggattgacagtcagatatgagcggagcatcaggatgcagtcagtcgtagcctacgcacaccattgtcatatcctgaagaagcgaatcgggatcagctcgacgttcgcaggaagatcaccatggtagaaccgacttgccgatcaagagatacccaaaggcagaaagggcgatggtcgcaaagagagctccgctgtacatgttgacggtgaggtgtcgggcgatgtgttgtctgtgtcaaagcatgagacgtcggactaggtggtcgatgatctaggtcgctagcgactctatatacaccctcacgacctcgacatgatccagatcgccgccttcagctgatcgacgatcggaaatcagggatggaaacagatttctgcaggcgcttactcggcatcggaccgaagacgagggagcgttgtaggttgccacggcaggttcgacagggagacgaaccaaaactttgtctctttctaacgggatcaaactttggaaactcatccgacgagagacggacccgattgccaccgagccccggcatggggatcccaaccagcggccctgtctaaggtctaaaacaggcacatgaacctcccatccaatgttgccgttgactctgctgtgtcgtgactcctccggtccgacgatgtttttgtgcagagccggtccgaagtggcatccacgaagcccactgagtcgggaggcacatatgaggtcgcaatgacagcgacgaccggaatggcaccaacacgtcgaggtcagaccccgcgcgcgccagaacccaactcgagcaagcatgtcgatcggtgacctcgtgacccagacgaatcctatcaaggcgagtcggaccggtctggcaatgtgagcattgtcttcatgacggtcactgatgttcggcggctaatcaacagcagccactcgaacgcagacctcgaaatgtcattggccatgaccagctacggtccgaccgctcagtatcttgcgtgcccgccagcgtgcgcgagaccacagcgttcatcgctcatgatgcggcattctggcgcttgtttcagcaagtcggtccgagccttcgagtcgtcgcagaagatattgcatccgatggcaacagtttccacgaggcaggagtctggtccgaccaggccgaggcgctgttctttaccagcaacaggcggaccgacgagcgcggtcgcgcttacactgcgctgagcaagatggaattcggtcgacgaggcggcgagagcggcgtctggcgagatttgagccgggatgagtatccctaccccacacccaatgggggcaccatactgcctaatggcaacgtcctcgtgtgcgatcagggtcgggacgaggacaaccacttgtcatccttgatcgttgtcgaccccactggccgtcgtcgaccgagatgtgtcctcaacaactatcaattcctgccgtttaacagtctcaatgatgtcgttgtcgttccttcggcggtatcatccggttccagacctagaggacagcatcgttcggaagaagatgatcacgacgacgatcaagccgaactcggccttgatgatggcgaagtgatactgttcaccgacccatcttatggacacgagcagggtttcaagcgggaaccagtcttgccgaaccaagtgtacggattcttccccgagactggcgaggtccgtgtgatggcggacggtttcgtgaaaccaaacgggatcgtcgtggacgaagagaggagaaagtgttacatcaccgataccggttacattcgaggtgatggtcagtgtgatggcacgcgaccagggacgatgtacgttgcgactctgcccttcccgacgtccagccgctgatcgcatgacggcagccacgtattcgacatcctgcctaaggtcgacggcgaactaccattcgaactgatcaacaggaggctatttgcctcggtagactgcggtgctcccgacggtagtacgtccagagtcttcgatccgtcatggttgacaccactgacttgaagttgtgaataccgcagtcaaactggatcaagaggggaacgtctacgcgggctgtttcgatggggttcatgtgagtctgacctacgaagacgagctagacacgaggggctgattcgatattcgcttgcaggtatggtgtgagtcgattgttagcccgtctggttcgaagcgcaacgtgtaaaaactgacgttggtttctctaccgaaatagcaccgactggaaaactgcttggtaaattgtaagtcagatcgatttgatggccaaactccgagctgaaacgagatctccggcagtctcttgtcggatcgtaagggaggacaagcgggatgcgccaacctttgctttgtacctggaggtctagtttgcatggccgagagccatatgtttctcgtggaagggttaagggttaaaggcgcgttactgtaatcagatgtcgatttcattccgtggcaaaatcactgcttttcttcaaaccatgtggtcttcgcagcatcgatactgcatttcgtatgtcgaaggctgagcacaacgaccactgtctttcccctacgatacataccaaaaccacaagaaagatataccatttcaccgtcgatgtagtggtcataacggaaagcccatctcacagccctatcgtcgaaaagtgtgaagaccttgacaaagtcatcaatactatccacgtgaagatcacaaacgtggtcggtgcccaaaagcgcctcccgcagaaggctcgaaccctcacctgcgtgatcctggaaggccactctcttggcaggtccctcgactgccttcttgacgtccaccttgtccgtccacgtccatactccgagtctgcaaccgacacggatacgttcagtgagtcgtccggatgtgttttggagggccgaagatcgtgaagacttcaaaaatcatgaagatcttgatgacgtgaactcactggcacaagtctcctctcatcctcccaggatcaactgccgtccacttgtccatcgaaccatttgacaggctcttgaatatgcagtagaggaccaacatctgttcatatggtcaattgaagctaagagccaatgggggctagggaaagatcccctaacaacgacatcagtcgtcaacgctgtctctattggaacccagcaaatgtcagttgtagctttgacgggaggagccatcatcaaaatgcatcgacacatcaaaacagtcttctatgatcacatcatttcggcttactttggcctacggttgttaggcttttgggggattttcttttccccctcacgggggcgaaggacgcgaggctccgcccttacgtcttcttggtcttggttcccaaagaatgggttgacccccgggatgagcccttgcggttgctgctgtcacgtcacgtcgagggacgatcagctgtcttctttagctcagggggcatagcactcacaacaagatgaacaccgagatcgtttgcaccgggttgctgatgcgtttccctcggtgaggggttgtcgaggatccgagaagcttcttcgaaatgttcttgggaagagtcggagtcatcggactcagttgaccagtgttacgaataactatccaaaaaaacttgcttacacatctgtcagtatcatgaagaattgccgaccaacatggacgatctcacacgatctcaatgcttgtgagatctcgttgcacctcagcaaagtgcattgttccggtacaatatacctagatttgcgcagtgccccgctttacatcacttcgtagggctgcaaagcgaagcagtctcaaaagaaagggttacacagttgctgtacaaagagttcggcacccacacgtgatgggtcctttgtcgtcttcctctcctgttctgtccgagctttagtctgccaagcacccctgctcctctccctgtgcggatggaagccatgcctctgtagtcgacgcctccctcgttgattgacaactctcccgcctctcctagttcatcgtcgtccgtggcctccatcttggccgccctgccttggctggcccgacattgtggtcggacatgaggaaacgaacggtgacatgggagtgacctccgacaaagaggtacgaggaggctgaaccctcgcctcccacttgatcggaggatgtagaccagaacgtaccgtccgtgagcatgatgcaacgcttcaaaggggtatgaagtatttaccatgagctgtctcgaacccagatctgaaacacctgaaacaccactcgagatccgggacactgacccatgactttccgtctcatgcgtgatcaggccggtctagccactacagcactcgccttgccacatagagtacaacgctgcgtacgctgtggccctgcactcgtgccactatggtcggagggatcatcttgtttcattgcgggatacaagttagattcgatgcgactggagggtctgatcctataccgctcatacacactcccgaggctaagctcattaacacagctcgatgatcttctcccgagccgagtggacgaggacgctcggctacgtcaatagtttcccatacatcaagcgtgtccccatcaatagcatcttatctcaagcgcacccattctgatcactcgcctggactctgactcgtgctcgtacactcgaatttgcgacttgagacttgtgacttgctaattacgacgacgatgagatgactcgactcgactcgacgtgacgtttcgatcgaggtcgatcttgatgcatgtcgcatgtcggcggatcggtgtggcaagggtcgttatccaatcgacgtcagggtggcttgtgcgtgcggggtacagccagagccaggatgtagcctttgacgcctctttctcaggtgacggatttgacgttctgactcgggactcgggactcgggactctggactctggactcgatcgcgccgatcattctcggaagatgtcgaggtctgcaggatgatggttcaacccacttttattcggaaaacattcggggtcgcatcttcggataaactcgcgatcgtcagaaaagaatatcgatctcgtgatcgaaattgcttccggtgattagtggcgtcggcggcagggcgcagcaggaggagggatgtcgattagcttccggtggtcgaaacatttgcatccgctcacgaggtcgtcgatcttgagatttctgtcaaagcgaattcgcgagtttctttcaggttgaccataggttgatgtcgaatttctagtcggtcagacagatgtgtgaggtggtagacgggtgtgaggtcgagttggaggagtgggttgctgagtgaacgctataggacctggccggtgtgtgtgtgtgtgagtcgagctgtttgtgcgcctcccccggtgattgggtcgatgctgtctgaccctcgctccacgcggggaacgggaggatatttccaacttttcgagtcaatcgagtcgtttcctagacccctggcatgtcgtcctaccctacccagaccttgctatcgggagggacgatcgagaaaatacactcgcaccacctctctcgctcgctcactcggatcgggctaaggtcagacagcacaagaattgtatataacctgtgatcgatcagttatacctcgtcactccacgtcagtagcctgccacccttgcctctcaaaataaactaatcaacccacgactgactactactcgccacgacctcgaccacgatctcgatctgacatacctcgaaaaacaaacaccgaacagacccacacctttatacgaccaccagttaccaatcatggactttgctattcaggacaaggagggtaacctctctctccccaacggttccaccgtcaacggttccggatctgccactcccgccaccaccaacggccactctacgaaccccaactctcaatcggcttcgatcccgcttcccgtgcgttccgacccctctacgacccagaagtcgagccataccggtacattcggtgtcaagtcgggtttggcccagatgttgaagggaggggtcatcatggacgtcatgaacgtcgagcaggccaaggtcgctgaagaggcgggtgcggtcgcggtgatggcgttggagaggattcctagcttgatcaggagtcagggagggatcgccaggatggtcagtacatggcgtccgattcgggatgtcatgacctggcatgagatcggggaggctgatacggatgatttcgtttcattttgttttcctgcttcgttcccgtgcgaaactgcctctcgatgacactctcatcgtcactcgtctcttgatctcttacactcgaccccgtcaaacgtctcccatcgacaattcatcccgtcttccccacccactcgacactaaaatcggcatcgactccacctatcgatcacgatccccatgcatccctcatcaccccgaccccgaccccaatctcctcccacccggacgccgcgccctggacacagtccgaccctacgatgatcaaggacatcatcgacacggtctctttgcccgtcatggccaaggtccgaatcgggcactttgtcgaggctcagatcttgcaggctatcggtgtggattacattgatggtgagtcgttcggtcctggaccggcgtgttgggttgggtgcagcgacccaggcatgaggacgctcgcgatttgctctcactgggtttgagcttggatcgacctggccgcgcccgactcgaaccgcattggcccatgacgtacacgccgaaactgatcatttttgctgctctcgccgtcttgtagaatccgaggtcctgaccatggccgacgacgtcgtaagtcgttttgcttcaaccctctcaccccgcgcatgttcacgccgactgactctcgtctcccgggacatggacgtagaaccacatccacaaggctcccttcaacaccccctttgtctgcggtgccaagaacctcggtgaggccctccgaaggatcggagagggtgccgctttcatccgatgcaagggtgaggccggtagcggaaacgtcatcgagtgagtctctctcgcgtcgggagcacgatggttgtcggttcgggcctcggtaactgaacgcggtgtgatggggggacagggccgtcaagcacgtccgaacgctcaactcggagatcaggaaggccagcaccttgtccgaggaggaactttacacttacgccaaggtacgtccttggtcgccgtggtctcgtcaaagtctggtccggtcgcgtgctgacttgcgcatcgacgtctgcaggaaatctcggctccttaccacttgttgaaggagactgccaggctgaagaggttgccggtcgtcatgtgagtcctgcgtacaaggggcagcaagctcgtcagactgaccgtctcggtgtcgtcacaggttcgccgccggtggtatcgctactcccgccgacgccgccttgatgatgcagctcggatgtgacggagtctttgtcggatccggtatcgtgagtcgcagggagtccccctgtgaccttcgcgccgatgctaacccgcacgtatcccccctagttcgcttcgggcaaccctgttcagcgagccaaggctattgttcaggctaccacccactacaacaaccccaaggtcagtattgccaaactcgtcgggccctgggttcaaccctcactgatggaactcgctcgatccctttgcagatgctcgccgaggtctcggccaacttgggagaggccatgtccggtgtcgacgttgccgacaacatgcctggtggaaggatggccggcaagggcaactagacggtgtcctcgcgcgcgatccgtcgtttgcctcgatagcgatttcgttcttgtgcggctgtgatagtcaaaaatcattatacatccatatacatctcgtcatccgtggcatcggggtttacaagtggccacatttccggatgcctggtaagtttcggatctagaacaggctgcagggatcggcacccaaaggcggctacgggatgaggcatcacgtgcgactttgctatcgcgctgcggtatttgactagatgacttcttcgaccctgaaacgcacgtaccggtgaacatgctcgttcctcttgtaccgatgacatcactcagaagggctttgagtcgataccccacgaacttcgacgagaacagccgtgaccggagtagcacctgcggtagagtccgatgcgacctttgtagccttgaacaggttcggataaaagaggacattagtcaccccacccaccttgcgcacgttcagtggggggacgagcctatctgctagaacgtctgcatacaaaatcctcgaccggcgttcatagacttagtatggaagggcaagcttgatgacgcagggtcacgaaaagacctcatgaacaaagcagcattatatgcaatcgctggaaaacaggcaaaaagtctcccatttcaaggttgtcgcggaaagtcgcggaatcgacgtcaggttcaccgaaatccatcttgattcgtgcgggtttaatcaccgctccttgagatcgcagcatgctatccagcctgtcacatgctgcggccgagatttctagaccttccagatccttgaataccactgtgaccatatgctgaggaaaaggcgagccattggaaccgaacatcacctgctcatcattgagcacaagcaggccgagtaccaccagcccgcagcgtaccaaaccacgacgccgcaatcgacccgtagctttctgacttgagtcaggatctattccttgctattcagcagactatccgattgatattcttttcccttagcaccacctgcgagtaccaccagcctgccatgtaataaacggcgacactgcaatcgacccgtaagcaagcctgacttgagccagtatctatttctatccagcagctcatcagattgatgtttttatcccttagccccgccggcataccgtcatgcttgcgcctcgcatcctaaccaacctctcctcctcagaccgggacctcccgccccttcaccgcccactgggggggggggggggggggttttccccccccccccccccccccccggggggggggggggggggggatgttccctcgtccctcgtccctgtctctctcgctctctctccctggatctgacccctccctaccgtgcacctggtcatggagcttactgaaagtcccactactatctgccgatctacaagaactttttttggtcggtcgcaaatatcaaactcatcaacgcgtggcgtcgcgctaggtgacgacagcgcgcctgcagcatctctcgtcctagatggattcatctggacgttgctcttggtgcatatccgcccgtgactctgctacctactctgttctgtctgcgaccgctggtttattgatagcgcgaactggctaccccatctccaatcggctgagagagggaaaacctgtagcgatctggaaggacgcctcgattcacgacgatcatctgcatgtctcgccgaccattccgacgtatgtctggagcgattcgatttactaacacgacgctatcatggattcgaggataagccaacgaagcgggtcatcgccgagactacaagttcgcagaaagcaacgaagtctgcagcttcgtcaaaaggttacagtaccgtcccttaccatgggggccgactcgtcggcaaccgagcgcatctttgaatatggatataaacatgattacaggcgatgacggcggattgtacaacaggctcgagtgaagggtgtatgccaggatgagaggacaacgatcttgaagacgatactaaagtacactgctttgcagaacgacagagccagagcgagcgaggaggggcgaccactcctacgcctagtgcttgggcttggtgccacagatcctggggatgctaaagtcttcggacctgacaccaccgccccaaggtaattgacccaaggtcttggcctcgggacccagtcccctgtcggcaaagcccttccagatgtcgcaagtgttgttacccccggtgaggatgacgtctgcctgaatgatggcgtccctggcggcggcgaagctgggtctacagggctgcaacttcattccttcgaccaagaggtgagcgagcaacgtgttaccgtgctttggcacgagacgaggtcgggttgagggtcgaccggcgacgagggtcgagttgacgggcatatagtagtcgttgggctcggtcgcgttgacgggagggaagagtgtcttggagaatccgtgcttggcaatgagacgctgctcgacgacgaacaacatctcggcccaaacctctccgatggcgtggactccctgtcaagtctgaggtcgttagcgtttgcgcttaggtgactcgacgatccatactcacccaataacccggcttgtcgagcgtcttgaaggtagacgggttcgacgtcatgttggccgagtagacgtagtttcgaatccccgacttgcggttggcagcccaggctcccatgccgtattcctcttcatgagtgccgtactcggtggtctggcggatgagcgtggcgaaagcgtcaccccagcctgccggcaccgacgggtcagctcgaacgttcgaggacagcaaaacgacgtggcgacgaaccttctcccattccgccagcctcgccgtacccgagacaaccgctgttagcaggtccaccggtcaaccgagtcgaaagaccgtgactatactcgtggatgacgatcccagcttcgagatctccgtcgcggtagggctggcaagtcgggggatgtcagtcgagtttactatggccagatggctccgagtcactcaccgtggcggtgtcccagacgtacatcctcattcgaggttgcgaaccgtcgggcggggtcataaagtctgccgacgcgaacgacccgtcagactcggctttccggcaggtgggcgggatcatgaccccaaactcactggcattatcggttccggacccgtcctgagcttgacaaatgacggcgtcgcctcctagcccaccctttccaaagttgtcctgctggaaattaccgctcaactcgtcgaatccgagtcgatagagcaggtcgtggtacatgttgctcgtgtagaacagttgtgtcaccgcgaggtcgctatcgagcgtggaaacgacatgagcggtatgcccgacgtggcgcgatgcgacgtgggggcaaatgactcacatgtactccttgggtcgaagaccttcaggctcgccgtactcgtaatcaaagatgtaggacgaattgaccggtcgagcgttgtgtaaccaattgctcgcgccttcccaatctctgcgatgcgaccgtgaatgggaatgtcagtgcgcggctcatcgagcgggacgcgggggtcgtgactgactcttgggcaaacacgttgttccccatggtcgtcgcgaacgaggtccacgtgccgttcctataggctccgtgcatctcgagctcgctcggcttgtacccttgaacccaaggacccttcaaccctgtcttttgacctgggatggactgcctcgagtacgggttactggtatcagggaccgcgtgccatccggcgggcgaggcgatcgggtcccaaggggcgtgaacggtcgagaggttgcctacggacgggtcgtttacgccaaaggggaagacgctgtgtgaggggcgagtcggcgtcagctcagcgcgagggatcgatcgatacctcggcgacggacactgaaggacgtacgtgtaagagtaaggtttaccctgggttcgaggcgggggcaagggtttttgtttcccgcccttgctgttcctcttggccgaaggcggggcgtcggaagctgcgatacgattgtcagcgatcgtcgtcgacgagaaacgactcgcacgtgaccggacccaccccaatcgacgaccgagacgactttgagatcgacggcgtccacgctggcctcgtaccagttctccttcatctcgaggacgcacctccagacgagggccaaccctccgtgggatgtctgatggtaacccaacctgacgtggacgggacctacgacgccaccgttttcgaccccaggtagaccctggagaataaactcgggcgcggtgttcccttcggccgggggcgcgaaatgggccgtctcttcggcctgctcgagggcgacctctgccctcatctcctgttgactaggcaaatcgtatggacgcggggacaagtgttccagtaatttcaagacggcctcgacgggtccatgctcgacatcgatgggctcggtctctccctcggggatgaccgacatcctgaacccctctgcacagacgaccttggcgtgatcctcgaggtgttccagatgggccttgacgaggtcccacctgttttccaggtcgaccgtgtcgttggtaaagaggtcggacatgatgccttcgagctcgaccgaggcttcgtccgggatggccgagccggacgtgccgaggaggtaatccctgaccagccccacggcctgagcgacgatcgacgtgacgcccggggtcgagctacgtctcgcctcgtccgcgtggtgctcctctgaccgtgcgagctgatcgatcccacgtttaagcctgtccatctcggtacgtacgacgtcgaccttgtcctgcaggtctttacactgtgcgttgtcgtcggcgggtttagtgaacctctggatcatatccgcaaacgaatcttgctgcttgacatcctgggtccctctagcaaactatgcatcgcgcgtgattatatgcgtgtatgtgtgtgagtgtatcagcgaccccgtgcgacacggtcgcgtgcgactttctactgacgttatctccgaaactcaagacccgacctcgctcatccacattgacattgaggtcgccatcgacgacttgaaggccgttgacgagttgtttgatgtagacgtgggtgacgcccgatcgggggtcggtgtaggtctatcaacaccaggtcaggtcggtagatgcgcgcgtggacgtgatcgtcgaggtggacgaggaaatagcggcggcaaggatcggaatgcgggatagaccgagatgtccatgttgatcgggttgatcgtcgtttttgtatcatggccggtcggtcgatatagagcgatgtcgagaaggagaaagaaaggagtcgttcagagtcggtcggtcggtcggggtggcgggggcgaagtgaagagatgacgtgttcgaaacaacaccatacgatacaatacggatccctagatcagcctcaatccggacttcgacctcgtcctcttcccccacgtctaggaaccccaggcaggacgggaagactcacgtcgcttctgatataataatccctcccttcttgtgcttcctgtagacccgcgatggacctgacgatccgtgctacgacgtcctctactttccaccccgacaccgatgccgacatcgaatcgtcatggtcatggtcgttaccgagctcgggtgtgacgaaccgggcatgctggtgtacaggtccgaaccctaacgatttcctacccgttcgtcgagtcgaggcgatggacccttggtcgtgacgatgatgttgatgttgatcgtgtgatggttgttgatgcgtgtcggctgatcggtgtgcgagggtcgaggcccctgccaagagtggcaagagggcgatgagtgtggttgatctcatccttgatgtgtaggatgatatcggatgatcagaggtagaagctggttgagtgaacagggggaggaggttggttgtgatgatatatacttactctctacccctctgagctagacgttgtcgcccatcgccgggatggtcgatatcgagataacgaacgaggcgaggcgaggcgacaaagttgcccgatccggtaattgaagatcggatgcaaacacggacatgaccgacggtccaggctctgacacggacatcctcctggctcgcctcacacggacatgtcggtcgaatctgcgtggtgggttgctcggcgtttcacgtgtctctccccagttcgggtagaacagaacagacaatcaccgagcttgatgataatgatgatgatgacgaccaaacccttgcgtttcatcatcgaggtctcggctcggctcggcgtctcgtctgtctcagcccccttgtccccgagactagcccgcctcatggccggccatgcgaatggaacgttctcccgcatcgcaaacattcaactcgcgtaaggctgatgaaacaaggatgaaacacccgaccgatggctcaaaagaagggaaacgcgatagagtgatcatatctttgcaaaaaagaaaaaaaggaagctcgagcaaaagatcgcttgtgacttcttgcctcgtcaacctctagatggtcaatgcatcctttggcccgtcggattcgtattcctctcttcaagtcgactcctgtaagatatttccgttcgactcgagcaatgtgcacccatcgcatgacgattcgctatcatttcgctccgtattgaaccgtggacgacattgttcataccccgaaccctctctccagctcgacgagcagcgctcggggggacactctgtctcttgtttatcttgacctacttttggacccagacgacgtcgatatcgggaggaccaccaccctcgtcgtcgtcgtcgacacaacccttaccttaccccctgaccccgctcatcatgttacgtcccgggtccaagcccaaaaacctgaccgacctgccgatctacccgactgattcccatttcacctttacacctcttccctttcttccacttctctgtgccgtatcggaccgtgcagctagcaagtttccccacctcgacgctgatcaaacagatcgacgggttcaacgtctttaccaacgttctcgtacaccacggtgtcctttgtacgtgtctcactccccgctattttcggtggttcataccgagattgatgcgttgcaaggtgatggctgatcatcgattttcatgcttacggccggtatcatgcctcacccctcatccaaactctcatcccattcttatcgtcatcgttatcgtcatcgccatcctcatccgctacctccacactctgggcgatcccgacccattccaaacccatagatctcacctgcgactccctcctcggacacatcgacccagctacgatcatcagcgggacccaacctggcccgttccggaattccgagatcgtcctcctcgatagagacgctgccgacgagttgttaaggcaagtctgtcgggcaggggcaggtgcgtgtgttccagcggatgaggatcaggatgtggaggagggtgagggtagtggtcacgggaaaggagaaggtgtgggtgtgggtacgggtgcgtcgagcactcttctataaggtccgttggcgaaaagcaggatactgacagagaagatcatagtcccccaactccaggctcgggagctgcaaggcatgaccgtaagctttaactttttcaccgttcggcccatccaagccgatcgtcgatcacgcgctgatgtctcgggttgacgcttcgatcgatccggcctttgtccagctttatctcgctgacgatccggacatgatgcatacctggtcgtttatgagtcattactagtaggtcttccttcccgcgccttgtccgccggattgctacccagtgcaacgatccgacctcgctccttgttgcccacctgactacgatcgatatcgatcacgctgcgctccacagccatttcgtcgccgaggacgttctaggcgggtatcgagccggcctgagcagtctctctgcgtcggaactggccgacgtcttccgtggggaaaaacgggcttttgagcggatcgtcatccccgctgaaaagggctggagggatgcggtcgggctgaacgagatgacgatcaagcggggaatcaccgagggtaagtgaggcgcaggtgtgagacaggcatcggtacccaggtggataagctgatacggttcgggcgactcagtggtggtcgagcgggacgagtgggaggagatgacctcgcgggaagctccatgggtgttgctcaaacgaagtgagtacccggtcccgccgtatcaatcccagccggactgacacgcgaacaacggccccacagtggtcttggtcgacagattcgccgctcatcacaatcaatcgagcccgacctcgcgttggaacaagatggccctcgccgcgctcgaaacgcgtttggaaacggcggatccggctaccttttggtcggcacctcgacgtcgtgtgatcgaacacctcgggatggacctgccgacattacgggcccgggcgcacggttcgctcgacgggcggaccgtcaagatcgtctatgtcgatcgacaggggaccaggaggagtctcgtcgacgaggaccatcgattcttggtcaactttctcgaacggctcgagacggaatctcaaacgagtctgggaaaacgggtcgtgtcgcggatcgttcaatttgaaacgatctcggccgacgatcaggttcggaccgttctcgacgccgatgtgagcgtgctttgaaaacgaccgtctttgcctcctgtgtgtttcaaactaacacgaccacgatgaatagattgtgatcggtatacacggaaacggcatgagtgggtcctagtgtaccggtgcgatccgtcgggcctttgagtctgatgcatttgtccatcacactcgcagctcatacggtgtggatggctccaggaggaatcgttatggaggtcagtccggccggtccgatttcacagacggacttgcagtgatccgataatcttacagatctttcctccgggatgtgagtcattttccttgttttctatcgaaacctgcctgaggcatcctattttcgcagcgttcatccgagagtatcaagtggtggctgccactctgggtcaccgacacgtcgctatcgtatgtatcgttcccccattctcagttcctagttgcagtctagattgtaggctaacatcactcaacggttgttgcgcgaagtggggagatcacgaatatgaacccgctgaatgggtaaaacatccaggcgagatgggagtcaaggcgatacacgatggcactgtgataccggtgagtcaacgcagggtatgcaagaatccgcctgctcacatcagccgactctcagttggatcatgcctttatcgagcgactcgtgcgacatcatgccacaagcatgcgaatcgaaccgtaaactagcgcgaagtgcgagggtcacgaccaggactgtagcgtataatcgagtcgactcctcggcttcacgaggtattatcatggaatgtacaatgatgccgtcgtcgccgtcttccagtttggtgtgcggcactgcaacgcctgcccaggcgtacgctctaccacccatggggcaccatcgagtgatcttcgaacccgcctcttcccaatctcgtccatccgacgttgcctccatcgacgacggcgacgatgatcgtgcggtccccctgtttcaaggacaaaaaggtgttgacctgaggcgtctctcccttcttgccctcggtgcgcctgccgaatagtgtcccgatccagtctggtacccacgaagcggtggtagcgggagccggcgtgggttcagccttcggcgcacctggtgggggcggccgtcgacgtagataaggtaccggcacttcgggcacgagtccaaacacctctgtgatctggggtaatgttgggaacggcaccgatcttgcgctgtagaccgccaagtgagcgcgccggacaaaatgtggatggcgatacagatggcccgacccggactcactcgaccaccccgatccagaacgcaggcgggttcgctgcgagcccttctgggctcgctttgtcccatttagccatcgtccaatgggtgttcggtttccatacgtggaagaacggcaagtacggattggcgacgagcggggcaaagaggtcggtctcttcggtctgcacttcctccttcgtcgagggtgtcgggagcgtagcggtgaccggatgagaatgcccagaggggatgatccgtagcttctcatacaaagcgcctagtaaacgaaacgatcaatactcggctcgatgcgtgtcaagttgggatcttggccgagcttaccgtaattcgaagctccatgtccgtccaaaagactaccggtgcttcttcgaccgcccgtgatcgccgtgacgatagtcccgagacatctcaccaacatcatccagaccctacccgggactcgcgcacatcctatcgcccaccgtctcatggcgacgacgagacgctgggtcaggggtgttgccggtaccacctcctctgatatcgtctcttgggatgtggcgatagctggctgtttcctgaatcgatgaggcaggaactgtggtgtccgctgtaccgtataccctaaccgcctcagacccgcatagacctggacgtcgatccatcatcagccaacagaacaccccgcccgagcccgccgatgatgatcgcccctccggctcacctgatacctttccaagctcaacccgtccgtccctataaacctagcgaacgcttccatggctgtgatctcggtcatgcccggaaagacctgctgctcgtcgtcaaactcgatctcgtcgtctcccttccagatctgcagtgaacccctttcgaggaggtacaacgcttcttcgggcaagagttcgacgttgctcttgagcgaggggacgtcctcggcctttcccttgcccttgagttgggtcttgagttggatgtgcgcctggacctgggcgggggaaggtcggatggtatgacccatcgtcaggaaggcttgtccccgtgtgaccttgacctgcgggttagggcaagacctggggcaccaaatggcatgcgacatattcttgctatcgtacctcgtcgatatgagctcgtggtatttcaaagtgatccgacgaccactcggtggactcacctgctcgtccccctgaccccgctcaaaccgtcaaacaacgcctgcctactctccctcaacatcttttcctggatcgtctgcgtctcgttgagaggttcgaaatccttttcacctcgtttcgggatgacgacccgtgcgggtgctttagcgaacggggtcgagggcgcttgctgcacttgcctgtgtttgtacaagtcgttagcacggcacggcgtgtcaagaccctgatctcgggcgggttagactagtgacccacttggcaaacgctttcatggcattcaggtcgaccatctcttcatccccctcgtcgtccgaatccgcagggcctgctggggtaccacctccgggggtagctttcgaggccgacatcgtaccggctttggtggtcttgcgacctgccggtgtagacggcatcgagacgggaataccgtcgtcttgcattgtcatatgatgaggttcccagcgacttccttgctatatcttcagggtcttaatcgagctatagcagctatcgttgtgaatcatcttcgagctctacatttcaccactcgaccaccctttgcacctcgactttgaaccaaagttggccgactcgagcggaagcaaaattgggaaattacacgaaacaagggggtcacaatgggatggtcagacaacgtagtgttcatgtcatcgcattgcatcgtcgtacacgtcccgtacatgttcgtcttgtgaccaggagagaaactaccacagcctcccttcatccccctctattcgttccacacctaaagacgacgatcgaatctcggtggacctcaagcgacaacccctagaggctgcctccaccctcctacggtctcgccgacctgtccgaccttgtccgcccattcgctcaacctctcgtacaacgctctcgattgatcggcgtccaagaccctgggttgaacccagtgaatgttcgctagcgagttgacctgatcgatggaccccttgatcaacccgagactgttccgcaagaagatgaaaggtctgcatcagtctctggggcatattggctgtcccgtcgacgcatgacacctcttcccccctgcgtacgccgccgagctcgactcacctcaacgctttcatgaccaaatgttccacttcgacgacgggcaacttggtctcctcggcgatcgtctggaagggcatggctctctgcgaccgggggcgtcggaacactgcctcgatgagggccatcaggcagatcttttgacgcaggaaatcaccgtccgcttggaggatcggctgcgaagagtgggacgacgacgatgacggcgacgatgacaacggatagagacgagggattccagtcgtgccggatcagccgctggtccccggatttcaaacactgaccacgtcgtcgactcgcctcttcctgtaatcgaccctggagggtatcatactttccaagatccccggcattgaagacgaacaacaagtctttgatccactcgtattgcgatccatccagtgctttcaggatgggatgttgcagctgatatcacaatccagggggtatgggacgtggacgcgatcagcagtcgtatcgctattcccaccccaccggtactgcgggtaactatcccgtcgccggctctcgccaggtgggtacgtaccaactctccgaaattgtaaatactatcccctaggagggcggccactccgagatcatgcgccctggtcacccgttcttcctgggagaggtcggtctcgacgtcgatgcacgcgaggaagaggagggatgatttgtaaaagggcacgtaggaagctttgatctgcgacgtcgacggtcgatacgatttcacccggggttcatgtttcatcagccacaagttcgggtcatcgggtcaagtcgtgacgatggatcccggcggaggcgacgacgtatcgtccccccgccggacctcgtgcgagatggatggtcggtgccgacgtaccttgtgataatccgccgagacgccgtaaaacccgcccatgacgccaccttcgaccctctcgagcccgtctagcaccttttccgcctcgtccagcctctctttgctcttgaccagttcattccctaataactgggcgtaggccaggttacacagactgagggcgtaggcttcggcggtcgggggaggaggggggatgtaggcccctaacccctaaccccaaaggagctccacagcccaactccgtcactcacctaacccattcggaaatcaacacgttgacgatggccgacaccaagaaggacctcgccgacatcgaccacctcgaaaagactggacgggagctcgattcgaacgaccatgtcgaattcgttgggcagctcgctgaacaagaagcgcacgaagagactgcgctacaagcacttagaaaccacccttggtcatcggtctgggttgtgtacggtatcgctatcatcattgcctgttcattcgacaacaacgcaggcggaaacgtcatctcgattccaagatttcgacaagattatggttcgccgttcgatggcaactatgtgcttccggcacagtggcaatcggcttactctgggggacccgctgcatcttccgtctttggtacctttggtggtagctgtaggtccgagggtagcgccagcatgagtcaccaattctcttacattccgccttgtcaatagacgttagtgacaagatcggaaaaaagtggaccatggccatctgctacgcgctcctgttcatcgggattacggtcgaggtcatctctcactctcaatccaacccgaatgccgtcttttttgccggaaaactgatcaacggattcgccatcggtggtctgctggccaccgcattagcctacattggagaggtaaatgcaaagctcattgacaaatgaactgcgactgatggaactttcgccttcagatcgcgcctcttgctctccgtggtatcttgctggcactctcggccatcgcgttcacggttggcgggatcattatcaccctcatcatcaaatttttcggaactctcgataacgaatgggcctacaagtcgtgctttgtggcgcagtacggagtgaccggtatagtggctatctgtgagccgcagccacctcgtacttgggtcaccactcgatactgaaccatccttgcccgacagtatggatattcatgccagagtctccgacctggctcttgtctcgaggaagagatgagcatgcagctcgggcgttgaaacgaatgggacatgatcaaactcaagcagaaaaggccatcgcgaccatcaaactcacccttgagcgtgctcgtgccgagaccgctggggtgacgtacctcgattggtaaatattagcggtgtacagatccattgttttcgtcaaatcctcaacccactttgcttgaaatcgtcgacagtttcaaaaagtcaaacctgcgccgcacgatcattgcctcgatgccgctttccatccaggcattctgcggagtcttttgggtggccggtttcagcacgtactatatgcaattggcgggatactccacggccatgtccagcaagtcattagcatggtcgggaacttgtgtgccgtaagtcgtaccctttcgaccacacctacccccatgacggcgactaacttcgactatatctccgcagtgcgtactcatcgaacgagcgggacgacgagctctaactttgtatggaatcgtcgctctgactgttctccttatggtcaccggtggactggcgtgtgtcggtaccccttccgcaaacaagggtaccgtcgctctgatcttgttctactgttggctgtataacgtgaccattggggcgaccgcatacgtcgcattggccgaaatcggaacatcccgtttacgagccaagacggtttctattgcgatcggggtacaaggttgtttctccgtgagtacagcggcgcccacagcgcgcccgaacagactgttatggggtcttaatcagtctcgccatctctatagtgtatgtggaatttcgtcttgccgtaccttttcaacccggatcaagccaatctgggtgcaaagacggcctttatctttggaggattctcgatcttttgctgtgtctacctctacttctatcatcctgagaccaaagggcgaagttaccaagagctcgacgagatgtttgccaagggcgtcccggcgaggcaattcgccgactacgtcacggacgctcagacccagtcggcagaggtcaagcagagggttcaagagggagacttgtcactatgagcggtactcctttcggacggagtgccgttagccggttgtgtccgttgaggttgcggtggaaattcatcactacctatggctgaatatacgaagtgtacaaattgtgtcggataaaagcaaagatgaaatacgacggaaagacttgagtcgaccaggtcatcgggataaccaggcccgatagccgattgaatcgttcctactcgggttcgctggtaaaattgtttagacagagaagacgagtggcgagcgccttagtgaaactcgagttgagcgcttgccatctctttgagtcgagttgacgcgatatgctcccgtcgccatttcgggacaactcaggtgaactgcgtcgatcttcccggtcagttgcgatgcaatccgagcccagcctgcacgccgcctcgacgattggcaagattagacttgtcgtaagagccatggcagatcgatgcattcagtcagtacctgcacaagagcacatctagatatcccctcgcaggcacgttgtgacagaaatgcatcggtgacgctcgcagcaacgaaacactcgagcgatcagttcgactcaggccaccatccaatctattctacattacctgattcctggcccggctagcttacatggccgcctcgaacgatatcctcgccgactccatcttggtagcagacgagaagcctcttgatacagatgacggctccgacgagaaggccgagtcgaggaagcggttgtggctgaatcgagcttccagcttgcccttgatcgccgcccttctagcaccgctctcgactctgctcgacatacctgccatgaccgtaagacagcgctctgttatctgcattgaaagtgctcttattcgagctttcaccattgtagcaaaggtggtacacacgcgacggagtcgaaatttgggatcccaagaccaacctcgccctctccgctatcggcctcgccctcaacattgtcgccaacgggctcctgctcgctcgattctcgaagcggtcgaggcgattctggggacctgcaacgacggctagcactatctgttgggtgggcaagacgttggtcgccttggtcaatgtattccttttcggtgcggccaaacggaatgatgatatctgtgagttgcaaaggagcaaggcgagacggatttcaagactgactttgaggacgatgctctacaccagtcgcctacacggaagccttttggtctgcgtgagtagctcgtttgaatgcccttcctgcatggtccgtagctcaaccttttcttcccattccatccctcaggatcgcctcggtcgtcctcgccgggctcatctcgcttctcttgctcggacactatttcctcgcttaccgtacaaaacgggaagacaagacgatcaagacgcagggagccaagttcatgctcagtatcagtttcttgctctttgtgatcggcgtgagtcacggccgcagcacgagcggtcgaagaggccgttcaaatgactgaacgacttcccttgcctgcccagatacaagcattgatctactcgtcaatcgtccgttgagatcatgttctagcaagttgggcgaatacgattgacctgacttcgctgtcaacgttgctgttgcaggaagactggtcatactttgacggcatctactacagcgtcgtgaccatgttgtgagtatggctcggttcctcaaactgtcgaagcttgactaagtcttttctgcccccttgcaacgactgtaggaccatcggatttggtgattatgctcctaccaaagtcgctacaaagattcttcttcttccggtgaggaccataccttgttgacatgggaatgccgctgatagatgccctcgacgctgatcgccaacgatgtctcgcagttctcggtcgtcaccatttcgcagcttgccaacgaagtcagtatcatcgttcgatacttcagtagccgagcccagagccgtaagaatctctggcgttcacgagtcgatgcgaggaccaaattacgggcccgacatccaagccccgattattcgctcgccgatgagatccggttgatcaacaagatcgcttcgaaagatgaactcttgtccgaatgttacgatctggcctggtcattctcaagcctgcttgtgttctggctggtcggagccgccgtcttttcctcgatcgaaggctggacattttgggacgcttggtatttcgagattgtgttttctttgaccatcggtacgttcccgtctccatctctgatgccaacgtctgaccaaaaggacgacggcttatcgaccttgtgcaataggctacggcgacttttctccccaaagccccggaggccgagtgtttttcgtgatctacgccttcgctgccgtacccctcgtggcctcgtttgcggtgcaagcggtgacgggtctgctgtcgacctacttttcctcggatgcaagccgatacggtcgacatcacgagggccacttgcccgactctgacgcactccagccacattattactttgtcgagaaacaccgtagacaaatcttggaactcggcttaacccaagaccagtcgactgtaggagtggtatctgaagagacgacggtggtgaaagtccagacgaacccgagcgagacagcggccgacaatcgccagttgacgcaagagctcatcgagtgtacaatcgttcttgaggcgatcgctcggcgtctcatcatcgacagcatgccacgaaacacgatcggccggacgatcttggaggccgaccacaatatccaggtccgcgacgtcaaggctctcggaggcgatacggagatccttgctcgacttggtcgagacaagttggccttggctgtggacagcgatatacccgtaaagacaccgaccgaatcgggacaagctttggaacagatccgtcgttatcgggaaatgttcgctcgcgtgctcgtgacggcctcggcactgcaacaactcgaaggtgtcgagaggtatcaattcgagcgaatgcgagtggagagtgccgctctgtcggggtccgagcgtcgtgcagaggagactgtcaaggccacaacttctgatgttgattcgcggatcgaaagcgggacatagcaggaggttttgttttcggtctgtacagtcgtatgctgtagggtgcttttcaatcgttgtattatcacgaagatgtaaccgatgtcctgatgtaaccgatatcccaacctttatggatacggtatcgcatggcgtacgctggctttgggcggaatgcaactcgatacggccggtttggacctggtctttaggcgtgttcccctggggcatgtccacgcggcgtttccagaccggccaagaatgcttctgcccaggcgatatcaaagggcaccaacgattggtctacgatcgcaggctgagctggactggccgaactcggacgatggttctcgtccggtgggtagacaaaggtgtagcgatggtccgagggcgaattcatggtgcctgtgaggccaaaacccagaactttgcaagtgcacgatgtggtgagtgtgtcgttcgagtcatactagacagtcgacgattgatgctactgacggttctgcgacaaccatccatccggcgtttcgtgctgaccgttcgaggctccggctgatcgcggtgtgtctgccgaagacaaatcggccaattcgatcccctctgcccgctgcaggaccacttgacggatatagcgcacaccgcaccatgtcaattccaagtcggctagtatggcaactattcgttggtagtttgcgctagctgtgaacgcgacgtgagcgcgaccatgaatgtggtgttgtccgctgccggggtcaactcgactttgacgaagcgcttgcgcgactgcaataggcaggggcatttgacgtttaatctcgtagcgtttctcaacgaggcactcttacggaagacacgcgaggcgatgtacaaaggataattagtccacggttgcgatatcgatttcggatcgatctgaatacagcttgtcagccccttcgaagcctaagtagacacctcatacattctcactcactagttcggcgaaagaaacaatgtccaatatgctcttggcagaactgatggagatttcccgtccgtccgggtcgagatggtcaagcgctggtttgaagtgttcaagtaaaagtaatgtcgggtcgtgaacaaggatgatcaatctacgcatcttgtgacgtcagcatgtcactcgtccaggtcggatatgtcgacgtacgtgtgaaaccaaagctacaacggacgtatatgcttgtggtcaacatctcacctcaacgcaagcagttcccggtacgattttctctcacatgtataagcacgaacgctcccccctgcagaagcgggacatatgacttgaaggtcgccgtttgaaaacgtagctcctcaggcaaggtggtgtcgaatcgattcagcgccatttgcaatgcattcaattgatcgcgctgatgctccggcgaatcctgagacaacatgattttggttgtggtgcctgccagtgccagtatatatccgaggtacggaaacgggtccggaagagtgtccctatcggctgatgatagtaccgggaatggggacactggatcgatgcggctgtgatacatgccattccggccggctacagaagctcttttgtcagctttcctggatgacgattcgaggaccggtcggcgggtaacgcactgccgatggtcatgatagcatccatcatgcaaagtgccaagtgcagtctcagtgaccgatcgaccggaacttgaggatccctcgtcgaaagcaagcctgcctcccattgtcggtcgagccctgatcgtcaggttcaatcaacatgcgctagtcccgcggcaagatccaaaagtaaggctcaccaagatcttgcgccatccggaatgccatcccagagtacctgtccaaaaagactacaaatgagcatgatatgtgcgaaacaaagacgcccgtttctcacatccagagaccctgaggaaagcccgggcgtcaggtcaacacggctgccagcgatgcacgggatcactacaactcactccatcacgatcggcaccaaactcgtaccaactgatgaggaggagtgcctcgacgaggtctagattggagacggctaactgcttgttgacttgctcctttgcttgcgaggaccaaatgtcgggagcagtcacggacagtccacgatcggcgccttccggcagggaacctgaatacattgtagaaaatctggcggcaagggcgcatatgatattctgcaaatacggcggtcttcgagtcacttccgcttcctggtcggcggtctgacatagaggaaaaaagtagaaaaagtgaagccgaaacagaggccaaagctgagagatggctgcgacatgctgtagcgagagccctcaaaggggatcttgtcagctctggcgtgaaagagcttgaatcgcctcggctcactggtcgttccccatcagtatccatgatatcctgcgccagagtcgaactgcgcaggtgcgatcgatgtctgggtgaggaaggggctgatacatccgctgtgactcgcttgtaacccggggctatggccgtggctccgctgttcaggccaacatgtcaggtcaacttgctgtttgacaaaccgctgatcatcagcggagcgctgcttacaagtagctatcgatagcagcagatgaaaagtggactgagtgagcatacagtcatatcgatgctcaatgataaatcacggcacctcaccgaaaataaggaacacgcagtcgggttgcagctacagaggcggcctcggcctgtccaggcgggatctgactgttcttcggccgaccttctgcgacaacactagtcgactttctcgacctagacgaactagacgcctcgataccgacaggtttgggtatgtccccaaagaacgaccagtcccaggtgggtacgtgtgccgccattctcccatccggttcgctactttctcggctgacctcaggccccatatccgagagggttggccgattctgactgcgatcgttagccaccggtgtatcctgcgttcttgaagacggaagcgtggctgcagatctgaggctttgaaacttcgagacagatggcagtgattggtctttgttctcggtcgagcctggctctcccttgtgtcgtttccgttcggtttgcctttcactgtctgcttcactggtgttcccgccgtgtcgaaccgaagactcctgtatggtcctccttcttcttcgcttcgcatggccctggggatactcgcacgtctccttggattccgtcttggcacacgccacacagaatggtcgatcgcccgaacacttgatctttcttgcccgacagtgattgcacgctaggttcgtccttacgggcttgtagtctcgaaggtccacagtaaattgtgccaactgtgcttggagggcagtaggaaacgccgagaggtccagggaagtatgaccggtggtggtaggagcaatggaaaggggagcacttggcgagtcgtatgccgaggccatctctcgaacggagagtacatcaaacgacggttcccttaaatcgacatgcgtacgagctgagtccatgccgctgacggcgacctggccttgcacaggcgagcacgatccgacactatgtgtttcttcgagtgaccgactagcccttgctgaaccatccggtcgatcgtggtatgttaggtcccgctacaatgtggtccgctccgaagacgggcagggtgctatcctcgacggacgccggacagaagcagagtctccactatccaggctgccgatagtgcatgaacatgagtcgtaaccatcggtacgtggtagatgtcacacgaaatgggcgatagctttgtagaacccccagaccatcacggagacttgctcgttctcgggaccgaattgtgtcggtactccactgcaaatgccaccgcggctcgctcggcttcaggcacttccgatgaacatgtagcatatagaggatctgtaatgtcgatgccgtcctacacttcgagtagctagcactacaacgaatctaaggctcagatcgatcggcaatggcgctcccaatgggagaggtctatcctgtaagcgatcaacgatggggtccggctccggcctcccggtatcaatcgctgtcggatggcacgtcattgaaaaaatcatacaagttgacggtggcgaattcatccgggctagtaatcgggtcattggcgtacggaccctgcaccgcacggactaagttcagaaacgtgatctggtagcggatcccgttcccgcatgtcgacttactactgcgatattagctgaacgattcttggcacgggatgatgaatccaaatcgagtgacgtaagatcgagatcaatctgctcgagcgcaaagttgaacttggacttgtcacgctgactgacagacatcagtccaaggcggcgccattagtcgcaggaattgcagagacactgatctgatactcactcgaggtcatcggtcgctctgtcggccaggtcgccactttcgaacctctccacgagctttcgaagacgactcgtctgagcgcgatagtgtctatgagcgatgcaaggcgactggatgctacaaacggactcaccgatggacgagtgacgggaaacaagtcgtgcatccgtgcaagatagtcgagggtgatgcgcagcatctctgcaatattggcatgcggcatagtacccccagtcgagtcgacgagtttcgctatatgcaccaagttccgagcgacttccacgacggggatggccatgccgggatccagcggtgtcctgccgggcaagagaccagccacggcagtgatcatttgcaagactacgagggaattctcgtagcagcatttgcgagcctcgttgatccaggtcggaggagctccatgcagtgcggctggatccagggaatacagcatgcccgggagcgaaatcctcgtcaggatgcaatatgtagcgtaatgaacgatatgcatgtgcaagagcgcatcacggctactcggctgttcctgatgatgagccccgtaattgtcgaccgtcatctccaagcgggcaggtagagccgatttccaagattgtagagctagtatcaatcgatcatacagcgaaccgtcttgccaaggaggtgatggttgcagctcgggctgcttcgaatatctagagaggaatacagagacaatcggttatcgatccggcaacaacacagattcctacgactcactgcaaggcttctgcacggatcgcacaagctctcaaagtccagcttgtcaagtcgcccgggtcgtaatcgagacctaaactgggcgttacgacgggtcccggttcgaacgtcctcggatcgagagacgacgtgccgactggccgttccaggacgaaattctcctctgaacaaggtagcccggtgtttaagatcgacaatggcaacgtggtatactctggtacgccatcggtagcgtacgagtcgcgcagccaggcgttccaaacgagacggcgctggacttcgctctcgaccgtaaaagtcctagtgggagactcgcaatgcagtcgaagccccagtgcgagcctggttgacattgtagaaagcatccacatgttgccccatcgtccacaattgagttcgtgctgttgtatgatgaggaggcacatgagattgagggtgctcagtgatcccaggtcggccatcaagctgcttttcgcggacgcgacccaagctgccgcttctggtgtcccgtctggatggtcttcagaagacctctccgaggtcaagtatctcgaggcgaccgcgcagatgcaaagcaagaggaccctcggtacttctcctctgtccagcgctcgctcaaacctcgctcgatgcaagaacccattgcatctcaacgggtagacgtaagcatagtatgcttcgacatgttgatcgagatgggttcctgtcggcaatggcctggttcatcccgctccgagtcagtcaccgatgatcacgcagagcctcgcctggactgaccatttctcgctggtcatcgaagcggcctgagcaggacgtgaccgcttgacacgcaaggggctctgtggcgccagtcttcccggattttttcgctggaaagcactcgtatcgtagctgcaggacagccccagcgtggtgcacttgccgcaaggattgctacgatcacacctggctttgatctgacgacaattgtcgcaggccattcgcaggcggtctagcttcgtccacatatgccagtgaatcagtgaatatcagggaaacctgatcacgaccctagggactcacgtctctctcgcctttcgacccaacgacaaacccgggccttcttttcgcacacttcgcatagctctgggcgttcgtcgcacttgacctgtgatcaatggtcacgcagcatcagtcgatagaaggcgattcgaaggtcagcgactctttgcgactcacatgggcatctcgacaagtcagacatcctggtcgaaacgtcgaggtcagggagacacatgatcagcgagatgcacagtcggcggcgatcctccggctccaactcaccacgacgagacctcttcggcttgacatccccacgttcagtcataagcgacttctcatcggtctggtccattgtatggccggcctgaggtggaagaccggcgagcggttactactcgggtatcgtccgtgctggatcgaatcgaagtccaggtagtcttggtcgaatacggctcgaacgactctacggtcatatccgaagctacgtcccgaggtctgggaggagacgggacaggtgaagtagtctgtgagtgtgtccttgatcgactgtggagctagaggactgtctgaccaatcgacggcataaggggttcgtaacccaagatgcaagatgcatagaagcgaatttgatcagaacatcatctcgaatcgccaaggatacgcgggggttgatctattttacgcggagccggaccgactgttcaaatctggtcgacttgtcaatcataaaccggtgaatgtatatccctgtcgaggcccgtaccagaagggatacggcatattgccaagatgatcattcgaacggacccatcggtgccattgccggcgccgctgaccggctgtgtgacattcaagcggatatttctcattgaggagttgaaccacgcctcacttgcgcttgacggtagggtgattgcgacaagccgatatctcaagtccgcgacggacatctatgttctgatcggagaaaggaagacatgatcggtttcattttggtacatcactatacatgctcgtggtagacaaacattcaacgtcctctaattacctgtgcttaaaacggctcgtgatgagaacgggggaagacattaggcagtcgatgcccaggcgatatagtgaacgatgccgccgtccacaccccttaacccaattcttcacctcaacaaggacagagcttgttcttgatcgttccaacctttcggtttgcatgtcagcccgaatgagtccattccatccccttgctcattccttgtgctccgcgtaaaccttttcaccgtcggcggaaagggctccctgttgactacccgtttcggcttgaccatacactgtctcatcatgacttcggtgaagaccctaatcagggcaagtcaagcgcatttcactcaggtcaacgttttcgcgccttgccgagatgagaaaacggcttacgggagggaggtggaggagaacctttcgaccgttgaacagtaggtcgatgtcttcgagttccatattggcggtctctgggtagagaaagtagatcatgggtacgaaacaagcgttgaagatgcagaagtagatgtaggtcttgtgcccgatggttttgatcgacacgggcgtgatttcgactaccagaaaggtgaactgagagagcgatgtcaggtgggggttctgtttcgtgcttgcaatccatctggagcacctacgatccagttggaggcagaagccaaagcggcagccggtgccctgatcggtagtggcgcatactcggagggaaggagccaagggatggccagcaagccaatggcgaagaaaaagctttggaaagtggcgtgagcgcaccgcactccccgtcctgcgatagccctcaactcacttgaagaggaacaacatggtagcagcgacgataccggtagccttgtacgtcaccgatgttgttcccgaaagtaccgccatacagcaacactggccgacggcggcaaaaatcatgagtttgcgctgcaagacgaggaatagtttaagctggtgctcggaaaggctgctaccctgcactcactcggccgacccgatcaatgagccagatgggtatcagggaggacaaaaagtacgcaatcccattgaagcccgagagcagtagcgaaacgcttcgagagagtcctacagactgctcgaaaatcacgggggcatctgaagtccagttgtggctcgcgtcatttagctttgtaaaagccaaaaagctaattgataggcttacagtaggtgatgctggaaccgaagtgaaagcggtcaaggtctcagtacccgagacacacctagaatcggacgcctacccacagattgatcccctgttcatgtcatgaaatggtcagcatgcgggtcaaagcgctgcaaccagatcccgttggacttacacatagctgctgcatgaattgcgaacccacaccgagcatgacgcggtgaaagtacctgtctttgccattagtaaagcatgccctgatatttgatatcttttctccatttttattggtcaaagtggccgcttcctcctcggcaagcgtctctttgatctttgaaaagttgctctcaaggatctctgtgcgacgttctgcaggcaagaccgacagttggtctaaaaccgcgcgagcctcgtcctctttgccgtgtttcaagagccaccgaggtgattcagggcagaacaatatcagggtgattgtgaagatggcgaacaacacttgaagagccagaggaagcttccactgagctggattgttgacaaacgacattccatagtcgatccagtaggcggacatctgaatcgggcttccgagtcagccaagggttgtaatatgtcgtgtgttttgcacttacgacaccgaaaatgttaatggcgagctcgatgcctagagctcggcctcgattcttgggcaaagtacactccgaatgccaaacaggaacggtactagtattcatgccgttgcccagtcccgtaacgatccggccgacaatcatttgcgggatgccggtcgaggtaaattggagtaccgcgccgacgctcaagatggagcatccaagcatgatggtgcgcctccttccgaaccgctcgccaaagaaaaaggtgaacagggagccaaatagacatccgatctcgtagatcgccacgacggttccttgcagagacgcagaaccattgccttcaggagtggtatctatgagggcactgcccactgagtacgcgcgctattccaagctcgaacccgatagacataccgatctcagggaactgcgaggtaaaggctgccccggtcaaaagaccggacatgacctgaggcgtacccaaggaccgttcatatcagcatgacactgcagagtcccatgtccatatcgaactgaccccttgatcgtagccgaataaactgattggcgatgaaccggtgagaagcgcgaggtacccaaagttagcgcgctgaagtctcaacgttggactgcctggaagtgaccgatgacttacaggaaagcagaactacaactgcaagacgatacatgatcagtcgtggagggcacattgatactgcttcagtcggagcttaccaagaggtgatagcccagttggccgcgcggcctcgaagcatagtttgtagaggcatcgcgaagagcagaaacgattgggtgttgtgcgatcgtgacctcccaatccgaatcaatacggaccgagagaggagccccgctatgcacgatcatatatactcgatttcccctcacaccttatgctacggaaagcgagaagtcgatcaaagttgttcctcggaacatgggaatctccgaagaggcttctaaacttgcgcaagtgccgattcgggccagacccagcgggaccaaatacgatcggatccttggaacgagccaggcacgacccgagatacgatccgaacggaccgagggattcaggttgtctgtttgcaacttatcctaaatgaccgaccagcttgcgagcagcccgccctgtgggtggctttgaggtcctggcaggtgcggcgccgccagtcgggatcatccacccgagctatgactatggctagccttgatatagcgacattgcccgaaatgactttcttgctggcgatttcaaggcgattggcggtaaacacttcaatcttgcaaacccagacacctttcagcatatcgacgacatggctcccatcgctaccatagacagctcccgaatcgagcagggatccgtcactaccgaccctggtctcgctccgatcgatcctcaggcatcctcccgtacgtctggaaatcgtttaccctgcatcaatcatctgaactcacattctgttgctttctttcagccgctccggtacgaaaatcgtacgacctcttctcgctagccgatcagggtgtcatcgtcaccggaggagctaggggtctcggtctctgcatcgccacttccctgctcgaggcccacgccgctcacgtctattgtctggatatcctcgacgcgcctctcgactcggaatggcaagtcgccctgaaaacggccaagcagatgggtggtcagatctcgtacaagaagttggatatcaccgatcaagctgccgttcagcgggtcatcggagaaatctatgacgagtgtcaattcgaggtgactgggttcttcggagcggcgggtatccagcagatgatccccgcgcttgaatatcctgtcgagcaattccgaaagatgatggacgttaatgtcaccggtaggccagttcttctttgtcctactgtgaaccagttcgacccgctgaacaggtatttttatggttattaggcacctttctgacgatccaagctgtggctcaacagatgaagcagcgcaatattagtggtagcatcgtcatgaccgccagcatgtcaggatcgatcgctaacaaaggtcggtcaccttgaattgtattccgagctcgtgaccggaccgcttaccttgtgtctgttttttcgttcgcacattacaggcctgacttgtttggcatacaacacgtccaagtcggcccttttgcagatgtgccgcagtgccgccgcggaatggggccagtatgggatccgagtcaacgtgagtggatgaggtccaaacgtttacgccgatcccgtttatccatttcgcacaatgtgctcaataccgtatctggtagaccctgtctcccggctatatccgcacggcgatgacggacggtctcctggcaacgcgacccgacctcgaggaagaatggcttcgaggttcgatgctcaaccgcctttccactcctgacgagttccgtggccccgtcatcttcttgctaaccaaggctagcagtttcactacgggggccaacttgatcgtcgatggagggcataccgcgttctagggaaatcgtgacccggaacttcgagcaagggttggcaagcgttgtataaaagggtttcgttatctgttcatgatcatatgtcgctttttctagtcatccctggtccctgactgcaagcaatcgcagttttggggccagcagcacgacgatccttacgcatttggaatcagctgtacatgatgacgaacgacctgaccatcaatcgatgcaaagcaattgccatagtttgcccgagacctggcgctcgttcgcgcgtgttgagatcgacccatcatatcagaagagaactacatcttccgaactctatggcaggctagcggtctctgggttgtgctcgagctgatatccgagactgtacaaaggggatgtgatcgggccggaccttggccccgagggctacgtattggagccgccgattcgggttcaggcactcccgagaacaggtatgatttcgagggtgcccgatccgtttaaccgcaaactccgcaagtccacttcatcctcagctcacagatcgaggttggcattgcttgcagaagatgcggatgtacgaccgcacttggctataaggtgttgcatgacatactgcaacgacgatggtaccccttcacaccatcatgcccgcggccaggaattttcaaagtgccacaaagcacaatatcgcgctcgtcaaccaagatgcctcacgccatccaatcagaacctgtttcagagtccggtcacagcaacggcttgaccgccaagcccaacaccaccagcaagatcgtcaaggtaggtaatgagctgggagaatatcctcgttcttgactaatatcatgtcgttctcgcttgccagccccgcgaggaacaaatcgtattgaacacaattcgatgtcttgccgccgacctgtgtcagcaggtgagctgggcgatagcgtattccacggtcggatctcgattgttgatcttctagatgtcgctctgtaatcctctcagtacaagggcggccatcctggtaccgtcatgggtgccgcagccatcgggatcgctctatggcgatacgagatgcggtacaaccccctcaacccggactggtttaatcgagaccgtgagccaatcgccttcgctagacagaccctctgcatatccagggaactcactggagttatatcctacagggtttgttttgtccgccggtcacgcttgcttgtttcagtacatcttcctgcacttgtcgggttatgaagcctggaccctcgaccagatcaagatgtatcattcgcccgctaccgagggttcgatggcagccggtcatcccgagatcgaatatccaggtatgtcacgctgcccggctagcggcttcaccgtgagccttgaattgatcaacatctccttgcctggtcaccaggtatcgaagtgaccaccggtcctcttggtcaaggtatttctaatgccgtcggcatggcaatcgcggccaaacagctcgcggcgacctacaacaaggacgatctgaaagtggtggacaacaagatctggtgtttcaccggtgatgggtgtttgcaagaaggagtcggtcaggagtgtaagtgaaggccggaccgtgaactcagccgtcgtgagctttagctgacctgcccatgtctgtacagccatctcgctcgcaggacatttgggtcttgacaatttgatcctgatctacgacaacaaccgggtcaccgtcgacggttctatcgacaactgtttcacagaagacacgtctgccaagctcgttgctcagggctggcatgtcatcgatattcacgatgggtctaatgacgtgagtctgtccattgcgcaggagaccgtaaatatactgaccacctttgttcggccattgcagctcgccgctattctcgatggattcgaccgtgccaagaacctcaccggcaagccggtcttcctgaacattcggaccatcatcgggttctcctctcgaaaagcaaacacgggtcccgcccatggccaggctctcggggacgacgaggtcgcctacgtcaaagagcagctcggcttcaaccccagccaaaagttccacgttccggacaaggtgtacgattacttttcgggttgcaaggacaagggtggcaaggccgagcaagagtggaacgctaccatgaaatcgtacgcttcgcggtacccggcagagtatcaggagctccaatcccgtctttcgggcagcttcgctccagaaggctggcaggatctgttgccgaccaaggataacctccctcaggctgctcagcccacacggaagtccagcgggatagcggtccaagcgctcgtaccaaattacaagagtttcatggcggggtcggccgatctcctcgaatcgacgtttgtcaattttgatggacaggtcgaattccaaaaggtgagtcgctaggtcgtgggacgaagatcactcaagaggtcgagctgactcggcgccgccatcagccttcatcgggtctgggagattattctggtcgtcagcttcgttacggaatcagggaatttgccatggtcgggcttggcaacggtatggctgcataccacaagggagcgtttgtaccgtgagtgaccgatgctgtgcattagatatagccaaccagcttacccgttgatctcgtctacacatagcatcatgtcgacctttttcatgttctggatctacgctgcgccggccgcgaggatggcagcattgcagggattacgcttcatcggcattgctactcatgattcgatcggaatcggtgaagatggtgagcaggccaacgcatccatgggttctcacgcaattactgataaagtctcatctacaccccaggccctacacaccagcccgtcgctttagccgctttctatcgcgccctccccaatatcaatttgatccgccctgctgatgccgaagagtgcatgggcatgtggacgctcgccctcgcggaaaagtcagccgacactcccagcatatttgctctgagtcgtcagccggtacccttgctcgccgggagcgaccgcaacggggttcatcgaggggcatatgtcatctggtcgcgtggtgacaaggcgaaccccgaagtgaccatcatcgggaccggtgccgaagtatcgcgagcaattgccacggctgagagcttgaccagcgtcaagaacgtccgagtggtttcgatgccatcacagagacatttcgacatgcaagatgctgtctatcgacgcgaaaccatcccatcgggaaagagcttggtcgtagctatcgaagcttgggcctcctatggatgggccaagtacgctcacgcatcgctgtcgatgcagtcgttcgtgagtgggaatttgcccttctacattaatacctctttcctaatccctcggatgtttcgataatagggacattccgcaccgcaagaccaattgtatgactactttggtttcaacccaaaagacatgtcggccaagatcgatgcttgggctgggcgatggcaggccgagtcgagattgcctggtgtcggagaatttgaagagctattgcttggcgggcatgagcattaacgtctgagatactgagccggcgcgtggtttcccgttgtactcttcatggacgatgtagaatagtatcttgacctgtgacctctagcttaaaagcctatcattacaaatgaacctccggatctggcgatcaatctctgtccggaggagattcagtatgacacgcagtcgcgaccactactatacagtgatttgcgtttactcaagttcaagtctagtcttattgaaagacatgcatgcaatgatgccttttgccctctatgtgatttcgccgacaccaattcatactcgtgcatatgatatctgtcatgtaaaggcgaacaacatgtcggtataatcgaatcttggtctaccacacattaacgctggcattcttctcctcgggcgtgtcaaagacgtcgatgtcccattggggcgagtacaggtaaggtacgttgtatcgcacggcattgttgcgaccgagttccgagatggtttcgacgtcttccttggacagctcgatctcctctgcagtcggtgagaaaggacgttgccgcattcagccaacacgcactgagaacatcgctggctaccgatgctcactaaagttgctctcgatccgactcggggttacactctttgggatgacactgaatcccttttgagtgatccaggcgaccaagacttgagcaggatccacattagccttttcggcgatctgcttgacttcgggcgaatcgacgatgcgaggctttccggtgatgttgttacccaggggtgagtaagctgtaaagtggatgcccttttccctgccgtacgctgcaatatcatctcgccgggtcaggattgacgtttcaactcgatcacgacccttgcgcggacaccgagcttaccctccaactcgtcttgttgaagtccgggatgggcttcgatctggttgactgccgggacgaccccggtcgcatcgatgatcatgtccaggtgtttctttgtgaagttggacaccccgatcgccttgaccttgcctccagcattcttgtagatatcaactacggccttccaagtctcgacgatcccgggtgcatcgcgatcgatgagggtctgagacttgtctgccgtgaggggtgcgagggtctcgcccggggcgaaagcgacaggccaatgctataaaaatgcatcacaggcgtgttcagtctgtcagaatctcacctagatggtcggttgtcctcatgtcgactcacgataagccacaggtctaggtaatcggtcccgagctgtttcaaggtcttctcgagatctgcagcgacattctcgggtctgtgggaattgttccaaagctgtgcgtggtgatcgggattagccggtgtgccacgtctttggaacgaaacggttggacagactcgccttggataccaggaagatgtcttcgcggggaacaccagaattcttgatcccctgaccgacctcgtcctggttaccataaatcaatgcggcatcgatgtgtctgcggcggatgatatagagaatcgtaagcatagcgtttcgacacgcggcagacctgctccacacacatacctgtagccagacttgagagcgtgttcgacggccttttctacctgtccagcagggctttgccaggttcctagaccgagctgcacaatcgtgacggtttaacttttcgacttctaacatgatggcagacatcgtcgactcttacccgaggcatctatacggtttccatcgcatcgagtgcggggtcaccttcgtgcacccttacactaattctcgcgattgggctcacctgaagcccattattgagggtaatttgcttaccgagggacattctgagatttgattgatgtgaaggatctagagacgagagacggatggtatcaggtcagaaactggcaaagtcagccttagtcacctgtcgacgagtacctgtttggtacttaaacgactacagcccgtatcgactgacgtggatgtgctttaaccggttatccgccatttaaccgcaaataattttgcttccgcgtgacatgatatggacgggcggacggccatggtggacgactcgatggatgggatgaacatgacctgctactctgacccgcatagacacccggtcgcctatttataaagcactgagcagtccggatagtagctcatcaggttcgcgacatccttgcacgccagcaatccaatccaacaaagccgaacgactatgccttcaaacttgatcaagccgcgctatatcgctctcgtaggtccccgctgacgcggagccagatccgcaaactaaaagaagatcgaccgactgatctcgttgttcatcaaatctatttcactctcgcttgttcatgttgacagaccgacatcgacaatgagcccgatgacgccgaatcttttgtaggtcacgatcggtagacggactctgaaagccgcgaggtctgaccttttttacgctccgcaggtccggctgcttctttattcaaacgagatcgacatcgaaggtgtgattgccgtgacgtcgacatggctaccggatcaagtccatccggagactttgaacgatattgttcagggttaccgacaagtccatcacaaccttctcaagcactcgcccgattaccctaccgccgaatacatcgactcggtgatcgtgcccggcaaccctacgttcgggatggccgagatcggcgagggccacgattcgactggcagcgaattgatcattcaggcggtggataaagaggatggtcgtcttcttcatatgggcctctggggaggggccaataccttggcccaggccctctggaaggtcagggctaccaggtaagctggcattttgaattcacatcagagccgcagtttgaatatggcatctgcaggacttcggaggaggtcgacaagttcatcgacaagtttcaagtctacgccatcagtgaccaagtgagtgcaatacctgaaattcattcgaatcactatctcgctaacactgcggtcctcattgcgaaaaaggatgacgccggaccctggatcaggcgaaactttcccatgctccgatacatcgtcacgatcgccggtcaaaactcgtacgggttcgccacgtacgttctcgttggccgtgtcctctctcccctccagaagaccggcgtgttccgaatctgaaccttcctggccgttctcgcagctggacaggcatctcggccgacattcacaacatatttgacggacctgacaagacgctcgtctcgaaggaatggatcgccgagaacatccagatcggtcctctcggtgccaagtaccccacgtacaaattcatcatggaaggagatacacctgcttacctcggtatcattcccgtgagcgaccggcctcgacacagctctgaatagggctcgaactacattgactgatcctgggtttcggcgtggcagaacggcctgaatgtccccgatcgacctgattggggcggctggggcggtcgatacaagaaactgctagatcccggatcccgtcattatcacgattcgaacgaccacgtgatcagtccggtcgacggcaaggaacggtcgactacgcatacgagcatctggagatggcgggatgcgttccagcacgactttgcggcgagaatgcagtgagttggacgtgctctatgtttcggagttgcttatgctgatggcgatggcatattcgaggtggaccctggattccccaacgacccgcccaaaccatccgccgacagtcgtggtggatggggacgagtcgcatgaaccgcttcttctgaatgtcgagcatggagcgaccatcacaattgatgccagcgcgtcttctgacgtggacggcgactcgctgtcattcgaatggatgcagtacaaggaggccgaattctttttccctgtgagcttccgccctgtcggcttgatcggtcttgcaagactgacgccgacaactacacaggcctttgttgaagttgctactctaaacttccatggaaccgaaaggacggacaaactcaaggtgactttcccagcagacactactacaagtatcggcttcatcaccgtcaacaagaacagtcaaaaatttcacctgattctcaaggtgaccgatgatggtgtgcccgctttgacaaggtacaaacgcgtgattgtcaacgtcagcaggtgagtcatcgcgggataatctcgcaaaccataccctatgctgatcacctttacgatgcgcagcaagtctggcacttcgtgacggaacgccgggccgcaaagaagcatcagatatctcagtgttataactgcttcctgcacggcacatgcagtcgatgtgattcttgatcaacattatcttaaactctggatcacaggatgttcagtcatcgcgcgtaatggttggttaccatgtaaaagtcttaggggtatctatagtcgtacatgcaggaccgaattaaatcgtctcatcagatgagcaggcgttcattgttggaaattgaaatccccgtactgagtgagatcaaagaataattggttgaattcttggtcgccaaataatccgtcggcgtcccatagcggtaccgctgatatcagccgatgtcagtcagatacagcgtcgacatgatcaacccgccggtactcaccagcttgactgccagtggactccgggacaactccatcgagcgactgaaagacggagtcgcgaagctgccacatttcggaaacattcgtgtcaccttcggagcggtcgcagctcgaaatgattcgctgcagacgggatgcctaggtcaacatctccgggacgtggccatctcactctgtcgcaggcgcatgcttaccatttcggcttctgaaagtatggtgtctgtggcaccgcccttcacgacattgtcgacaattgatctgtcactacgttttgctgacaaaattcaacgacccaaatcagtaatgagctcggctccgatgcaacgaacatgcgcacctagcgctgcggcgatccagccgacaccgagccaaacatcggcttgttctcggagcactttggcgcagacggtgaagctgacgagagctgacgtcgatagcaaggactttgcccttcgcaggggtgctctgcttttttgtgcctgtgagcggatgtctatcatcgggctgtgagccaaagtgctaccaacatctcggcacggcgacttacccgaagcccaagtcgaggctgcgacgtagaaacactgattgacaaaggggttgttcaacagcaatttgcgattctgcgactgttggaccggtccgagcatcagcttgcggccctctacggctggacgtttctgcgacagaatactgacgtcgagcgaggccacgatatcttgtatgctgcgggcggcggttttttgtatctcgacggcttccgagacttgcatctgggcaaatgcagctcgagcgtgggtgaagggttctcggtagaggatggcaaggatgcagtagtactgttcgtcacaatgagcaaggcatgtcatggattgtggccggcgatgttgaaactgacccataaatgcagatgtaggtacatgtcgccatcgccgatgcgaatatgagctgtcagactgcgaggaagacggggccgagtcgttatggtcaggcaggttgtcgagcaaaggaccatcaaatagggtcactcacttgtcaatgttccaagtcaaactcgatggcaacgcttcgtacaggctgatcaccgagttttcaatctcggctagcgaggacaattcttgtgcgaaccctggctcagtgaccaacgagacccaatcggtccgaccgttggcagctcgcttcgaggccgaccccggcctggtcccgtttgggctactgggggcggtcacgccggtgctgtcaccggagtatcctgggagccagtatggcgaggcattgacgagctgagcgatcgagccgtacagctgggtgagccggatagtgcatgcaaacgccagagacgggcgttctggagtactgggatatagcgtctgatcgccgagttccggctgagtgatctcgatgtgtgcgtcgagaaaggtgacgggtcgaccggtcccgatggacaacgaacgatcgaggagatagacgctaagaggtcatcttgtcgtcgtcagccacgttttcagcccggaggattgctaacatgctcaccaccagaagagcgttcggcacgacctggatccgaacctcccggccatcttgcgatgtccgcctagatcggtcaccatccgcatggccatgccggtgtaggcccagagacctatcccggacgcccgttcaacagcgtcagatctctcgacgactcgctttgtcacaacgaaaccggttctctctcacccgcctcgttgttcatgcccagctcgtaataggcgaggaatagcaaggccgcgacgacattgttcgacggcatgcccaggaggggaatcaagagttgtttggcattgtccgcaaaggcgcttcctcggcaaaagggatgctggctgattgccacgacttcgtctagtgtacaaaacctgttcccatgtgtcatgccgcggtcagtatgcaggtcgctgcggacagagtcactatagatcccggctggggactcgcctcgcactcaaagcgcacatcatgctgaccatcaagatcgtgcccgcatcgaccggatctcctagacgtccgtcgacgagtattcgatctacaaaggggaagatggaaccaaaatgatcgaaaaagacgtcgacgagcggggtgcgtagatcgtgacgtgggagtctcgtatgcgtgtcgacgaggggagggcgtgggaggtcgatcagggaggacgtatgagcagttgcggttccagacatgggaaaggtggtcgggggtgcgtgctgatgttgacgtgttcgagaggtcgtaccccggatcgatagccggactcgtcccaaacccggattgatcgccgtcggtccgtaaggtctaggttatggcccagcatgcaccagctgattagcaaggtgccggagtcttgtgcggggaacagctcgtgcaaagctcacctgagatactcgtacgagagcgtctcgataccctcgcccgcatctctcggcgagacacccatcccggcctgtgcatgactagccgtctcgtccggaccgacgggttcgaaccctccgtgcgtaaagctcaacaagctgtagtcgtcgggagctatcgatcagcctgaatcccaccgtgaggcaaactcagtcggtctgcggccgacccactcttccgctgcggaatacgtcgacgtgtcttgctcatgcctgccattggcgggctcgagccgtccgcctatcctgctctcctgcaatcccgggtgaatccagtgatccgtgctatgtagacccaaggtcggactcgagatcgatagaggatagtctgtcggtcggggtccgtatgatggcgagtgggccggataattatagttcgagctgggttgcgagggaagaacttgatgttggtccccctgcatcgacgtttgcgtctgggtgtcagtcaagaactcaacattcgggtgtcgagagaatgaccggccattccccgctagagatatcgctgctcctggctcgatgaacaatcgagatgtccctgctccagacgtgctacgtttgttccggttgtctagggtttccgatcggtccgacgatcgacccttttccaatcgacgtggatcttcctgcaactccgggtcgtcgagagcatcttccgagcccgatcccgaggctgacctcgtcgcctcgtatcgtgtccgaccccttttgaactctcttcgcctcttgtcaacctctggccagtcacaggcccagtcccctgctagacagcttccacagtttggtctcagcgcgtcacatttccgtttcctctcgcgacacgggtaacaagcgacgggacctcgacgtcgtttctttgggacctgtcgagtgtctgtcgttgcggtcggtggtggactggagagagatgcggacatctctgcctcgtgggtatgttggtgttcagagatgacgttggcatgcgatggtctatcgggttgactatcgattgaatacgagttgcgagatcgttttcgtttaaccggagccggagattgaatcgcgtcaggcgcaaaccgggagcgggcgatgagatgagatggacgcagaccagacagacagctcaggacccatgacagacaagggctcagcgatgctttgcaggaactttgagagaggggttgctcttgtgtaaagtcactcgaaatgtcattgacagtattatatacaaaaaaccgaacgcctgatcacgactcctaatcacatgtcgttctcgtcctcgtcaacgatctgtaccttgacgctaccccctttcgggtccgccgccaattcgaatgctccgatggcatcctccaatccgaacgtatgtgtgatcatctcttccaccccctcgagcttgcccgcggacaacatccggatgacgagcggccaagtgtcgacgtagcggaagaggaacctgacgtcgacttcacgcatcgataggttttgaaggggaatcatctgttcgttatgaccgttcccgatctccatcaagacgccgcccgatcgaatggctgaggagaaagaacgtttcaatggcagtactacgaccactgcattgtttccctctgctcgcgcccgggaactgaccataaccagccgcatagaaactcgtctgcgcgcccgtacattcaagcgcaatctcgggttcaagcccttgctcgacgctatcgaacaacgctttgatcctcctggccacctcctttccatcccagcccagttcgcaacagagtgttaaatccgctcccatcgacttggccctgtccagtttatgcgcagcgatatccgtcacgcagatgggatacgcaccggccgctttggcgatggcgagggcgttcaatccgattggtcctgctccgcatatcaatacgggttgaccgaagacgaggtctgagcgttgaataccccctagagcgaccgagatgggttcgacgagtgccgcggtggagtacggcatcgagtctgggattctggcatgtaccgcacggatccttcgagcatcagcgcgaacccaagtggggctgtgggcgataggattgagaactcacttgaacaggaaagaagcgttatgtgcgacgtatcgagccaaagtcccatccgtaggtggtgtgcctgagaacctgtcccgcgttcgagtctatcaggatcagcctccatcgccactcccccgtccagccggatcactagtctcggacccacctaacatccggacacaagttatacctccctcgtttacactgtccgcaatcccaacaactgacgcccggttcgatcgacacccgatcgccgaccttgacgtttttgacgtcgctcccgacgacgaggacgatgccagcggattcgtggccgaggacgagatcgtgtttgatggtatagtccccgatccctccggatttccagaacttgatgtccgagccgcatattctgagaggtttggaacgcagacatggtaagtgaattcgagaccggggaaagtatcgagagcagaggcggttcgcgcgactcggggcccaatgggcgtactgaccctgtagccttgacgtgcacgacagcctcgtctgccctagggacggggaaaggcaagtttttcatatagatctgatggtcttccgtgacgacaagagccaggttcttcttgatcttatcgccattgatggaaccattgccgttgagatggccgttgcttcggtgtccgttctcgtacaggttctcggtagggtaagaggccgggttcgtgctaacaggagacatgacgtgaacctgttttgaggcgatcgtgatcagtatgtgattgtagggggtgcccaagatgcgtctcgatgacctttcatgttcacgatgatcatagagggaggctgtcagatatacgttcgagcggtcattgtaatggccaaagagactgcagtggccatatctgatttaaccgctttaccgaattggcgcaaacgcgcttgatagccgggggggagcagggacgcggtaaagcgagttgagaatcggactgcgccttgtcatcagagaccggaaagatggtggacaacggaggagcgacaggttggataacgcaagtccacctttttctcgcaggctgtcagagaatggcctttcaggaccacgaggaccgggcagtcattgagatgggcgccacgatatgacaaacagtcccatcatgtgagtgcaagtccaagcaggcgtgaggctacccaaagctatccgtcctcgataggtctggttcaccgcgagcgacagatatggcaatgatttaatctgcaaagattgtcgtttccaaaggacacttcacagttggtatgatgtacgttgtcttcattcccttgaccccgatctcgatcacacccaatcggacttccgtttcgcacggctatctaccctgcgccggcttgataaacgatcgaataaaggcccttgaaagggaattggttctggacaacactcagatcagatgccttgccgcgacatcgacttcgtgggtctgtcattacggatcgcacggcattccccttgctaccggattcgaatgggccagcgaccgacactcgtttgctactccttcaatagcgcttcctcgggatgcgtagcgcagtcacagaccaccggcaaggctttcataaggctacaagtccggaagcgattagggactacctcattacaatacgcccatgaaggagcgactgctgcattctaggctacgcatgtatccgttcatgccataggtctgggtcgagactacatcgccggttcactgacctggtcagtactcgaatccacggtccactgtacgttcactcacttggcctcaatatctggcatagcgggaaagcctctctcaaacagcgtctggttggccgcatccaactatgtatgtcgatgggtcaacttgcgagtcgagcctgtgcagaacaagtgccactacaaactgaccatcgggcccaccaacggaaagtatttccgcgtggatgcagccaattggctggtcccttcgatctgtagtgccaaaggtaccatgagagacccatcgaaagcctgttcgggctcactatcgacccaagccattcgtctagtgatgctctcgacggctagcaacggaaagtcgacgtcgcaaaagacgaatgccgggtccgcgacgacggcacgacgagcggggtcacagacaaggttgcaatgttgtagagctcgacgtcgggtattgataatccattcggtgggcgccttggcgagagcaggttgattgagacctatacgcaaatgatggcccaaggatgccgatggtaacgagatagcgaacaaggtagaacatgtctcgtgataccaagtttcgagcatgagcactgacgccaccgatgcatcgtctcgacagttctggatgatggctgtagtatccgtcaaccaaggagcgatgctatccagccaacagtacagctcatgctgaagagcggcaaaccgagatccctccgaccatggaacgcacgcccccgatcggcaagccacggcgtgtctgcagggcccaaacggaacagagtcacgatacgttagaactcgaggatttcgcgagctatctatggactcactgcataactctcacccttatcgccatcagtcgaataaaagcgctcaaaggactctgaggtccgaccatggataggccatctggatgcgatcgacccgctcgttctcgtgttgacaacatgggcatatcgtttgcgcggcccgccaagtaatcctcgtcggtgctcggcagccgtatcgtcatgcagtcgggatcgatgcagaggttgaaagatagaccctcgtgggtttgccagtcgaaatattggcacgcccacatcaggcgtctcttggtttcccttctcacgtagacttccgcctcgtctcgctcgaaggtggtgccagttgaacgttggtcctcgccagcaacatcgtcctcttcgacattgagatccataccgatggccatccgcgccgcgaccggactcaagagtcgtaccacctcgaactgtgcgcttgctacggcgtgataaaactgtaacaataatgctgcgagcgtgtccagctcataatcgtagagtctagtgaaaattagcctcttggattcatccgcccacgtttgtgagcgggagagcatcgagtcgtcggcactttcggcttcgcgatcgttccagcggacgaatcgcgtggagcctgcgcatatagccaggatcagggggcgtgataccgtgccggctcggatcgatcttcgcaacgtcggctcgtggacaaagccgtaacagccggtagggtgaacatggcgaaagtaagcgtcgacgtgtcttgcgagcacagtcggatcatccagcaagtctagactgtgcaaagacataaacaaccatcgagttcagccagcattccttaacaggagccacgtcgtcacgcgcaactctgccacgcttggctcgttctggacaggatctgctgccaacatcccttgctgtgtatcgtcgtagatagcgccgtccgcctcttgattcgcgtccccggatagttcatcacgatccgagtcaatctcgaccaattgagagggatatctgcacggaagactttttcctagacaccgtttgcaggccggacgatcttttgaacatcggacccgatctgagcggcattttgcgcagatgacgagacccgtgtgacgtgctggtgggagaggattgtcatgtcgttggcacggcttgcaagctcgcgggcttgggctcacggtttcgatgccgaacagatgcgccttgctgccattgacactcgagatccatgcgatggcatttccggcaacaaggctgagtttcgtcgcatttgacccgccgacgccgacaagtgaggcagcctgtagcatgacagacgagccgtcggaatgactgtcagcgtacgaggacctcctcttcttcccccaacgaaagcaatgccgtgagggacaatattgactgaccggtcgtctttctgcggtgtcttcgttcggtatctgacatgacggtgcgctgattggctagacgttgaacgtgagacgacggcttccatgaagcgtatggcttaggtcattcggggggtcaacagtcgagtcgcaatctcggaaggttgtcggggtagtcagctggtggtttcgttccgaccccgagcaccttctctggcttcaggacgacggtgataatggttgtcgaagcacctgctcgtacgggccagtaatatgccgatgaaagctacagagccgtcgattcaagtcacgtgactaggtcaccatcgaccttgttcagccccggcccgtctcggcgttttacttaccatggtatcggctgtcaggattgatgaggaatgtctagagcctcagagattcttcgccagaaactgccgaatggactgatccaacttgctcgcaaaatgttcaagggggcggcatgctgtgctgatcgctcatctctctcgcactgcaatcatataaggacacagcctggctctgtacaagtgacaatctggtatcgcgaaggatcgggtcctgaccgtctccctacgagtgacccaatcttagacgtcatgagactctgcagacgtggccttgagatcgatcctagagaattccctagccgcgatcttacgctcgaacaactggtcgatctcgattgtcgacctgccgacagtctcagggacacaaaagtagctccacacgataccgatagcagtcaatccagcaaagctggatggaagatcatgaacgagtcagtaaccactcctagtcgtcgaaagccggctcccccgatctgcttcaaactgacatgaatgccgtcttcgcgcccaagttggcggaatcgggttggaacaggtaagggaccgtgaacgtgaacagccacccaaagagcgcgttgacggtgagagcaaggccttgtgtcttggctcgtagccggagtgagctgatctcattgactagagcgtaagtcggtccacccgtggcgaattgctgtgtcgaaatcgccagattgatcagaatcgccagtgcctgacatttatcgatgagcgtataagcccggtttgggtaaagtcagtcttcattcgcgtcgggctattttcgatccgtccactgagctgggtctagacttacccaaccgcctgcagattggtagctaacaaaacctaacccgccgatcactatcaaaacgatcatgtggatgatgttggcgtagacgaaacaggcccgccttccgaatcgctcgagcgcgtatccggcaaacagattggtcacggagctgagagccaacatgctaatggtaatcttgaagacgatatcgatattgattccgacctggctcaaaaagtatagcccgttggcggtaaaggcgttccctccaaactgatagacgatccagatcgtgcaggcgatcatcgtccttcgcctatcaacaggatcgtggaccaagtcgatccatcttgctgcagccaactgagcatgggtctccctttcgagagcgatggctctctggatgttggccagcctggcgggcacgtcaggtgatgaggcgccatacagtctgtatagggatcgccgagcctggtccgttcgaccctctttgacttggaatacgggcgattcgattgtgaacaggagtcctgtaatcgtcaagactgggaagatgagcctgtgagcgaaatataaaaaatgaaaggaaaagagaaacgagcattagagttcaatccggtttcatgtactcgtgagcgtcggaccagaccatcgactcactgtaaggccaagaccaaacgccaacttttccaagcgctgtcgaaaaacaagaatcgctcgtatccgacggtcagtccgaaaacaattcctgcgtatatacatgatcaggctcgacatgggtaccttatctacacggacatgcggttcgctgctcaccaagtatcaaggtcatagcaatcaaagccgacgctggagcgcgcattttgacgctggcggcttccgagatgaagttggcagtcgaaacgactagggtagaggaacatgccaattaattgagagaaggccggatctcgagcagaactccaaaggcctaccgaagattccttgaggaataccaccaagcatctgataccgatgggatgtcaacgacggacatggatttgtcgaatgagtccaggatccacataccttgccggcgagtagcattcccctagaattggaaaacatttgaatgaatacgggaccgattataaaggtggaggccatgagggatgtctttttgggtccaaacctgtacgtcgtatggctgtctcagtcgatgcgctcaagtgctaccccagaggataaacccaaactgaccggtcgagaaggaacccgcagatgactgaaccgaaaccgattccaagttgggtcatagccgtccacagtccgagcctgatcatccggaaaataagcataagtgactctgtgagatgcctagattgctgaaacataccagatcgatgggatgaggagacctttggtaagaggatcgaaagtgccaaaagtaatcaagaaagatggcctgtacggtgaaacgacagagagagtcagtcgcgatagattgacgttcgcaggtcctaccatttacatggtgttgatgatacccgaagcgcctccgtcgtagccctgcccaatacaagaaaagagaaaaggcgcgctgcaaagcatcaacctccagttggccttgaaggtagcgcccatagggcgggcttggtctctcagagtcagcttttgagcttcctcgaggagcgcaggttctggagcctggtccatctgtcgtagcgcattagggtagtcgattgcatctcgaccttgatgatggtccagctcgagatgagcgacctcttccttgtccagatccatacgctgcttgatatccatgtcggcgtgatgttgtcctaggttgcgcgacgagcgattggaatgcttgcgaggcgagattatgacgagtgggggaagactattcgagagcacttgaacctcgctaaatactcttagatcggtaggcccgcccgagcagaggttagactcgacgatgatcccgcggcgccccacatctcgttcgacccgctcgggctatctttgatccgcggagggacatcttatctaagttggtgacatgcacggtgagcttcgctagtccgcttcgatagtccgcttcgctagttcgcttcggcgcaccgagcgggacagtcactgtggactgagccagtactgtttagacctgtcgggccgccaacgcatgtcgggccatggcggtaagactacataaacgagaatgatagatcaaatcgatcactaagatcctgccgaagtgaccttaagtaaaaggtcgaacgtcgcttacgtacgtgtcaacgtaaactccaacgtaatataattctcgtcatgactcaagcctcaaacatctgtcggccaaagtgagtctgatgattcctgtatatcattctctgtcccaactttggtcggtgtgacatcgctcacaaagagacttttggtcaggattcggtattggctaccaggcgttccgtcagaccggctgtgcatcacccgtcaactccaatcgtgcaaggacaaaggacttggaggagtcgagctgtctttcctaggcgaaggtatcggcaagccgggtctgccggacgatagcaaatggggcggcgcagacggatctacccgggacttcttgaaatttgtcatgagcgaaggagacaggtaaacgtcgagtctcgggcgtgaacaggctggaaactagcaacaggccgttgactagggaaagctctcagactctctctccaggtcgacatcactatcggcccagcttttccggctatggttccgggtctgtctccaaacgatcctgcctccgcgaaggaggtagtctacgcgatcgaagctgtaccggtgagaagtggtatttgtcaagtcctcattcccgtcccggcgttcaagcctacgggattaactccggccaacttcgacgtcacggtcgaagagagtctgctcggaatgtatgccgtccgagtggtagatacggcaagtaatgagggtcccaccgacgagactttcatggtggcacagcgggaacaccaatctgtgggctcagatttcgtcaagatcgagatcgggaaccaaacgagtcacgtcgagttcaactttcccagaatcgacgaaagcgagagatggtcggtcgttgctatctacgagcggggaaccgctcaggtaatgccgcatcaaacagggggctgcgacgtgatctgattccgattttcaacgtagacaaagactattttcgagcaagatggtaatacttacggagtagagacgccgtacgttgtcgatcacttttctaccaaaggagtggactcgttggccgtaagtctcctttctcctgtgaaaatgggaaaagtgtggttcacatcggctagtcgagcgtgtagcgcttctataaggagcgaatcattgatgacgatctcgttcgacaatttgcggcaggtggagcctgcctgtttgaaggcaagtatcagaatccggtcggaattcctaaggtatctaccatatactgaccaattctcgtctccggcacagactctctcgagttggcgcaagcgcaacattggacgcccgaacttttgggcgaattcagggatcgaaggggatacgatctagagctttaccttccatggttatgccaagcgccccaggcacactttttttcgccgattcgctcggtctttcaaggcgggagggagacctgcgggactagcataacggtcagggaaagggtactctatgacttcaagttgaccatgtccgacctattgatcgagaaacgcttgattcccctgcgtcgttgggctcattcagtaggtcattgggatgtactggtctgctcaaagagactcacgaacacggccatccacattaaatagatcggtctcagactccgaaatcagccgtatctttttgatctggatgcgggatgcgcggctacgcatactgatattgtcgagggggaggtaagtgcatctctttgcgcggccaaatggtggcattgaccgggctgatgatgcctgatagaccctctgcttttttggcaacccggatgccttccgaatactcgcgtctgggcgggacgttgcgggatcgcttctcttgtcagacgaattaggggctaaaatgcatcaaccatatgagcttagatggtcggatctcttgaagctcgcaaatcgcgacttctcgctcggcgtaaatcatgtaggtattcgtggtgtttgagaaagatacaattcggctgattgaactcgacggataggtcatcatacatggtatgccgttcgaatacagtcagaactgtacttggcctggctatatgccgttcgcaggcagtgggcatatcccaggcttcgcagatgcttggggtgaacgacaaccccaatggcaaggtaagggccagtccacagtatcaccatacggaccatcaccgacggcttgctacgattgacaatacaatcttgccgctcgacagtcgcctcaggttaccttgattatctgaccaacgtccagactatccttcaagaaggcattcctaccgtcgacgtagcgatatatcgtggagcgatcaatggtgtgaaagggggttactctgaccaaaccctgaatcaggcgggatattcatacggttttatatcggacggactcctatcgcgggacgatgctttcgtatcgaatggccaattatggaatgctgggcccggatataaagccctgatcctcaacgatgtgatggctatgagtctttggacttcgcaaaagcttctccagctggcacagcagggcttaaagatcattctgattggcgatgcccctgccactatcccaggactgcctcccatgggtacctcccttcaagaagtcgatatagcactgcaagcagttttccacaaactggcaagatcagaaaactttgtttgcgtcaagaatactgctggtctgccgggggctctttactcgtgcggaattgggtaagcgggcgaaaggcagggagaaaccgtttacgggcatgtctaatatagcgctttatcacaggccatctgtcatttatggcagagcggcggacggactggtcacactctgtcgaagggatcttaaacgaaagatcatcacatactatgtcaacaatccaacaagcagagactcgtctcagaaaataagtctcgccgagactggcataccgatgctcatcaactcctggaatggcaacgagcgcattacaattcctttcatgcgtaccgataattttcggactactgtccacatcgaagtcggagctggttgcgctgcgatatttcagtgagcaacaccctaccgccagatcgctgttcactccatgctgactgacggttgtaaataaacagattggctagcggcgcagaggatatccccccgaccgtagattcggaatctcggctaatcaattcagtttctgaacgatccctcgaaattcgaggctggtcgtggacagttgagagctggtccccggaaaacccaactggctgtggtaccgctgctaccgtgacatgcaggaaacaggtacgaatgacttttgcgagggcctgacatgcagtttcatgacccattgtcgatccgacagatcccgcacatatggacggatttgatttcgtggagcgaggttcccgaattggcagacgtttcgggtatagggcgatatgaggcgcgtttcgattggagcgtggatccgaccatacccatcgaacttgatctcggacgagttgaagatgcctatgaggtctcgctgaacggcactattatcgatggatttgaccgcttgaataacagggggtcagtggctggccaggtgttaccaggggataacagtcagtattcgcttgttatcgctgatgagaagctggcactgacgtcgtgattgtagtattggttgtcaaggtttatacccctttgattaacgttctgaaggctcaatttccgaaaacatacaagaagcatgccaagggggagaacggggtgagctcgaataccagaaccagcttcccacggcaagccgctcatatcatttcaacttgcacgaagctcatgggcccggttagcctgaggtacaattcgaatgacgtcaaccacgagggtcagaggagtacggttgaagtccgaggtagttccttgtagtcagtatgttaataactacagtcagtcctgtgacatcaggtaactcagcgaggcgtcgagactccgtagcacgcgagcgcgtcatttccggagcacgacgcatgacaatcacgtcgacggatggagggtgctattcatgaacgggctaagtacccaatatgatgacaaagaagatatgaaggtattcagagccctttctactacttccgacacagacgttcccacatcatcgagcgcgttacgtccgaccgtggaaccgccctaagagctcgtggctcttagaaaccaggctaatagggaagaacagtcactgggctgaccaatccgtagctgtcatcccacctcgagaaagccatgtaacccgggaacacggcgccaaagcctgcgttgtagaccgtgctggtaccattcgtcaatactccgttatagccttgaatggcgaggatcctatagagagtcctgatgtcaacctcgagagttcgacctgaccgcgtcgtggtcatcgtgtcttaccttagaaaattccccaacggcgtcgagacttcgacatcaagggtgttgaccccgggtttcagcaaatcagtgaggtcggtagcaggatgcatgatgttcaggttgggtccctggaccccgttgatgctgaagttgcaagtatgcgaacatgctcccaggtccaggagcgcatgcttggcttcgccaacatcaaaagtagttgagtagatcgcagtgcccgatagattgcccaacgtcgcatgctgtccgaaacgggtgaggtcggtagagttgattcgaacttcgctcgtagtatatccagtcgatgacgagttgtcgggtacggcgactgtcgacgaacgcgcgatcgacttagcaaaacgtcaatggaaatgctttccgttgccttaccccaagactgcacagcaatgctccagttggacagcgtaatgggttcccttgtaccagtcctcttggcggtatcgacgtccgacactgggatgccggcgataccttgcttagcgccaagcttgaagaggcgataatcgcccggggccagcgtgagatcaatgtgcagtctatgcccgcaacgaacggtcgcaatgagcaaaatggatctgcgttcaaagacatcgggccatgattcacctttcatctttttgagtactattaaacagtaatcgcaccccgcctgaccaggtgtccaaaaggtagggggtctgtttctcgtagttctcgagctgaacactgatgttcgttgtattatcgccgccgttatagatgtaaaagtagtcttcgccagtcacagggtcccaacgcttcagagagaagactgaaggtatcacagaccgtcagtgagcttagtttgtaccaatgtgtcaggaaagtccggactgaccgttttctctctgctcaacaaatcgcgtgtgagggtatacttcgatctctccaagcaaatcgggaagactattgaaatcatcgactttgtgaacgttgttaagctatttgagagggtacgttaattgctatacagtatccgctggcgttaattcgctcaccttcatcatttgtgcaaccacggttgcgatatcctctctcgcctccgagtagtagggactagcgactggcagtgatccaacgaatacgactggtaaccctgcttgagcaaacgctagtgctttgtctatacctgacttggtaacctcggtctggttgtcgaaaatcagagcagagtaaccgggacctcctttaggagaaagatgcctgggtggagaacgggatccgaatcaaattccgcgcactaaccgcttcccagagccgtcttacccgtcgtgtacgaccgaagagtcgagttcgaacatggcaggcgaagcatactcgtaagtatatcctcgcccaatcaacgagtttataggagtgtgactgatggcataagtcgggtcaaagttgtcgtcttcgaaagttaaccggtaaaagaccaaatccacgcaaggttgtcccaaggacatgatgtattgaactcgagaaagtgaatcgctgcaagtcgatacgcggttagcgaaatcaatacgtcagatcacattccaacaggcttgacttgcatgagcgggcgaaggagattccaagaaggttgtcgaggcccatgcgcttcggagaacaagtagaaccaggcctcccaaccaggcgttttcggaaatgaaccgtagggtcccgaataagcatatccgtgccacatcagctggttgacccctgcagcaaagctagcgtgtgcagactgtcgaaagacataagcgatgagacatttggctagaaatcgagctctaggcccgggctcaccttgagtaagtccgcccatttggtctgatatgcgccggtcccgacggcaccgatctcgctgctaagaacttttttctttgttaggtgctgagcgcccattgtgtatcggtaggcagtgatattgtcggcaaagaagactgattgaagagcggttccaacagaaatgagccgtcaggaaagaaaagtaaggatcgacgaccgggatggcgtacgagactcgatttccggcgcgtcgatcagtggccaagcggcctgtatatccaaaggttgaccgtatcccggctggcaagaatactctaagcccacagagtgggcatacttgacaagcttggagatgtactccttgtatccagtcgtgagttgctatgagtggtattgatcagattttgtgcgcttctccctctgccattgtcgagtcttacagcataaaagtctttccggatcttgttgagttggccattgtccgtgtcagatccggcctcgaacagattgccgttctacaagcagacgattcctttcagtcctatgctgatcttccggcccgatcacgtcgacttacccaaggcgcatagtgagcgtcgagagcgttctcactaacattcgagtagaggaaaggcagatacttttcgagctcgattcctcgatcttgacgaatcttggcgagtaaaccaggtgtccaatggatggcttccgtcggaatctccagagagtcttcccagaggtattttctgggatacgaacaggagtcatcagcagtgggtcaaatcatagcgttggtcccgatagccttacccgactgtgctgttccagtattgttcgagcgtgtttgtgaagctcttgtcgaggaaatcgaccacagtttgagctccggcctcggaccagtgatcgacctggtaagcggtccacgtgttgttatctgaaaatgagccccgactatgagaatagatccatcgagtggtcacactaccggcactgcacgctcactggtcggatcgctgcctgagaaccctccataagcggcgattttgccgataggacgttcccagaacgtgaacatcaggtaatctccatcccgagctccaaaagtcaagttagtggttccgacgtcatgagactggaccgatcccaaatctagtttggtggaagcttcgccgaggattccatcggggaccgtgatgttttcgttgacaatttgccccggcgtcaatctggctgtgacgatggctaccagagtttccgacgtgacatcgagactggcattgactagtggtctaggaagtgccccttcaaaggtcgaaccttgacgaacgaggactgtccctcgagccagctcggtctagtcaagtaaaccgtacttgatcaacaatttccatccaggttatcacaccgctcggtcatggcacctacgctagatccgacttgattgggactcgccatgggtaccccagcaccctgattcggaccttgagggaaatcggccttcaagcctagtctggccgaggtctcgtaaaagacctgcatggcacgacgagagggttccgattgccaggcgtagagcgtggggtctgattcggtgtcgttacttccgtagcctaccagactgtggtatcagatggtggaatgatcgatcagagatccgcagagcgcgagcaatacggcagcatctacttgctcaaggtattgagcgcctccgaaacccttggccgccatctcttctacatctcgacggacaaagtcgggatcgatatttccagacggtacccagtaacggaatcgaggccctgttggaaggtaaagttcgtcccgttcaacgaaaccaccgaagtcagtgatatgatgcaccgtggaagaattcacagatggttaaagcgctgcgtacggtgctcaggctctggctcggcgaatcttgcagcatcgaatgaccctccaggcacgtatcctcgaggcgtttcatctctcggatcaacagttcgcggctgattgtgtaccggcaagctagccccctggaccgccacggtactcgacaagagtgaaactagtacctttgtatgtctcatcttcgttgtgtgtcgttgtctggcccgcactcgatctacatcgcaagtttcaaactgcagaacgagccgcttcacgctagctaccattttatatctgctttgacctcggcataaacataacccgagcagttcatatctatcagcaatatcgaacatgatctagcggggcatccactttggtcgacggggtctccgtccactttggctaagaatactccggatcggctccgcgtcattaccgaggtccgcgagccgcaggcgacaacagagcgagtgtaacggcgatcgatcggtatgaagtgaggcggtataagagcagcgtcgcatccatggcgatcaccaacaggagctagccacccccttgaaattctcagtagctgagcggggtcctcccgatgtcgtaatgaggacgggcgacaagccgaggtctcgtacgattcagcgtctccgaatgcatggcgatgtttgaaagccacggtgtgcctctaacgcgacgggagcatatatcttccagcatgaggatgaatacttcgaattactctgaatagggactcggcagcgcgattgaagatgctggatcgcttgaacttggtgggctcaaagaactgacacgcctggaacaagaagggccgcactagcaattcaagctcgacctgctgacattcgtggaagtgtttcgacttcaaggccgtaattgctgagcgtcacatgggatataatgagggtgtgggccagttccatgctggctggatgtgagcagacacaatcggggatcgcaaggccaagcttgacaaggttcctcttggccctggtctcccatggtgacctaacctgttgcgggaagctagacgcgacaagtaaacgacaccctcggagaaaggctgaatcgcaatcgaggcgacccgtccgaatcgcgatctgaatgcgccgtcgtttgcaagagtcccatttgggctctagaagcacccatcttttgattctgaacaccatgggaccgaatgagaccgcctagacagatcgcactgtcgcttcgagcggagaggctctgacatgcgaaagtgggaccggagactcgcggggcagcagtctggtatagatcaacgatactgaatctgttaccaagacaaaattctgacgaggaaggatcggaatcagcatttctatggactgagtcgattctacggaagctcgattcttcgtgtgagttctaggccatcggcgagagtctttcaacgtgtcttccctcggacttccaggtcgaacagtcatggcagtgcgcgcattctacattaaagtagcgctccgggattgcctgcatcttgcggaggagtcaggtggcatgggtcgatctagggtcggaagaccgcgtacccacatgtagcgatgtcgatacttcagatcttgcttgacgactatgcgcgatggccagagtcaccatgattataaagcacatacagtacgttacaggcgcgatctagcgattaattaaacgtactagactgggcgccgatggataggacaaatcaaagcgaggcgacagatgaagagccaactcgaagcgaattcgaaagaccagaaatccccggcggcctggatgttgaccccactacatgatcgtgcacttcttgtccttttcgcccctaccgacactactccctcctccgcctcccccgcctgaaccgatcgagctaggtcctccgattcccaagtaactgttcccaaacttctggatcatggccaactgttgtttcgtcaaccgtctctcatccaggctgtcccattcggtcactcgggaacctagcagaaacttgaccgtccaatcggcataggtgaacccgaatttacgtccctgaatctttcgaatctctcgtcgttcgtcctcgtacgccgacatgacgtctagatgggggaccccgttatcgagggaagattcgtactcgtcgatcgtggccgggtcgtcggtgcacagtccgacggtgatgtaggaagctgggaatcgacgttggacgtcgagcaagaaggtccggaaggcttgatgaccgcagttgggtgctccgtcggtgatgagcaaggtaagcacgccctcctggtagtcagtcagaggtacattcgtcagcgtgtgagcgggcgatgatacgaatcctctgcacgacgactgacttcgcgaaccatgtattcgggggtcatgatgtcccgcatgacttcgagcgtcggggtggtcccgctcggtgtccgttgaaagaacgggtaaagcgcctcgaccgtgtctgccttcatgccctgtggcaacatgttgaggaaatagacgtccaggggttccctaccccgtgcgatggtcatgaggtcgaaaatctccttgaccatggtctgtaggatcttccatctgatagtgggaccttgaccgtacacctgttgcatggccttcatcgagccggaatcgtcgaggacgagacggacggacgagtattcacggagacgcgtgatctgggtagcaaagtaaggggagatccccttatttcgacaagcggcgaggaggtgagcgtccgagttgtaggcagaggtatcttgcatgctgacgtcttggatgtagacggggggtgcagcgggtgccgaaggtggcggggcggccatgggcgtgggttgatacgcctgcggttgctgttgttgcatcatcccgttctgtccgccaaatgattgtcgtttcgaatccatgctcgtctgacctttctggtcgttcatacccgtcgacatcgatgcggtgcccatgaacgggtcgatcttgggtgcggtagggtcatcgttcatggccattgacgatccagccggttgattccaactcggatcgccttgaggtggtgggcccggtgggggttgggggtaggcaccgaactgttgagtctgttgttgagtcgattgcatcgtgtttcgtcgttaccaagagtgtctatgcagggtgattgcacgatatgaaagtgcacaaggtcaagtaagtaggtcgatgtcgatgtcgatgatatgttctcgatctcgccatctctctgctctccgaggttcggcgatgacgtggcgcgaacctcgaatcgtcccaaagtggcaaccaaccaaccaaccaagacaagataggacttggcagtatagtcatgacgttcatgtcgttgtcattatcaccctgagactcagaaacggtagatgagactgccaggaacacgtcggtatgtgacccaagtctgatcccagatacaccgtccagaggtcgagtgcgtgcgtcagatcccgatcctcagcaacgccgaagagacaggtcccgttcgtttcggagggaaatcctcgagtcaagtatgacatgtgatatcggaacggtttgcaaaggagacgcctgacgtgtgagaaggacagacgtcagagtacgtcatgaatacggtacggagtgcacttggctgtttcttttggtacaatcgagcttttagctatcctagatgtcctggtacattcccgtgttccgcgctgaagccgccccgcgtttccgcgtttcgaattttgtacaaccgtcgacgtgagatgaaagtacatgaagcagtccgctttcgatcaaagacgccgaaaccacaacacctcatgcttgtccctgagacgcttgatcttgcaggtacgtctttgtcccggcgaatttcctagcggggatccgtctctcatacaattcgtccaactacgtgtggcgaacgtcgagaggaaagggacgatgagcgactttacggatcagatgcagcactaccagttcgactcacctcggcataacttcgacccttgtgttccgggactaagaagaagatcaagaccagcccgatgaacccgagtccggcgaaaaggaaggccgtcttgatgccccatccggctccactcccctcggacaagagcatcaacggggtcgtatagttgaagatcaacctatgtaccacccagcgtataagtcgaatcgagtcgagtcaggcccggttacgacacgtagcgctgacaaaatgtcatcggtactgacccaaagaccccgctcatggctgcggcgaaccctgccgtccgagctctcaacgctgcggtcgaactctcacccaaaaagaggtaacccatcggtcctgcactcgaggcatacgcgctggacagcagatatcaagatcaggttcgatgaccgtgtccatgcccgttggtcccgactcacacgacccagatacacatcaaggcgacgatggccgcgctgaccgaggtgcccgaggtgaaccctaatccgccgatcgctgtgagacaggcgaccatgatagtacccccgaggagtaacatcggtcgtcggcccgtcttttcgacgataaaggaagacataaagaccattccgatgagtaggatgctgttgagatgtaggcttacggtcagggcgattacaaggagggtagcggaagcttatccgagcctagttgactcacttgacgatgatcgttccgaggaatgggttagccaagccggcttccttgaaaaagactaaagtgtgatgacacggtgtcagtcatgcgtgatttacgcaacagagtacagcgtactcacgagcggtgtatccgaataccacggggatcccgatggtctgctgccatcccaagatcgagaacgagaccagagtacgcctcaaattcgtccccttgaacaagtcgaggtaagatgtctcgacggatgcctcggccccgctcgacaaggttccctcgaggtcgagtctcatgacacttagttcgtgctcgagatcgtatccagcgatccctccgttcaatcgtctcaaagccttggcagcggcttcgggtttgcccttgcgaagcaaccaggctaggcggggcaagaggggtctcagcgaaccaatcggaacgtatggtgtgatccgggactcacgaggtgattcgggcaggatcaagagggtcgtaaatacaagtccactgaagagccactcggtgtacaccaatcgtttgtagagctccggtcgcgtgtccatggactggataacatagacggcgatggaatttgtgaattgacctattgcacactactatattagttggggtctctcggaatgacccggccggtactgggctcacccatagcaaacctgagcaatcgcgaagaaacgatttcagcctcacattcgcctgttctgtctgagcttgacgtaccagaacgagtagacgatcaagagagccccccggagctgaacgggtgccaactcgctgacataagtcgtcagtgtcaactggcaaagtcctaccgagaagccgttgactggaatatgcagttgccagtgagatcgtgtcttcgaatcgacctcgagccattcgctttctcacagagtttggcagctgtccatgctctccaatcgttggcaaacatttcgaccaggcaggcggcgaccataaacaaggtgagcagtgcgatgttgaacctccggccgaaatagtcggcgggactgatgggcccgttgtttagccgaggttatagacgctaggagagtcagggctgtcgacttactatcctcctacaagaagtgcagcgatgtaacccccgctgtagacaccgccccagatggctacgtgctggggatcaagagccggaccatcagccgagctcaatgtcgcgaatttggctacgagagtcgacggtcagatatattgtcgcggactccgactgctgcgccgcacacaaagactcaccgataaagctcttttccgcgaccaggtttcccggtaacgagtactggtagccgtcagagcaagctgtgaagagtgccatgacgcacatcaacgccgtgcgtcgaaacgttctgagcgtcgccaaaaagcctaggtccgcgtacgccgatacgggtgcgacgggtgccgcatcatgctcgacgtggtcgatctcgaccttggctttctcatcctcgtcggcatggagcgaggggaacggagggtgaacagtagggatggcagcttccatcctgtagcgttctgatgtctggatgtggtggacgtgtggggtaagctcttggttgacagatggtatagtgtgagtcaggggtccccggatcatctcaaatttgaccgggatatataagtgtggggaagacgatcgaggtgagggataaccgccaagttcaagcggctattgcggtagagcggacgagtgccttcacgtccacgtggacccgtcgccgcaagccagccggtagtagattgcttggccgcactggaacagcggggtcgggtgtcagatccgcatgaccgctgggggtccggcaggcaaccttttcgagtcgacacaccgctaccggtttcgattgaaaccgcgctcgagtggaagacagagcctgaaattcgagataggtgaatttttccgatcagctgagtacggcacgcttttcaggtacacaatgtgtcagatcaaaaggcaaccacctcgaacggcacgtcgtcaggatcgaatttcattgcgccaaggtatcgcttgaattgtatctggtcacgatgtcacccgcacatcacgctcgtacgactcgatggtgtacaattcgtacagcatcatgtcgctccagaggtatccgccagggagcgcctccgaatgtaacctttcgaccacggcggattctgtcagcgggcgctatgcatttgattacatgataacccaccactcacgcgtccaccatgtacctctccatgcccagcatgaaatcgccccatttgccgatcctgacgctcgccgctgattcgtattgctcacgggcacatttcgcatcacaccatgctgtgggagtagcgggaggaccgcggagcgcagcctcgagagcggatcgaagctgaacgaaacggacgagcgcattcgctcgaggtgattgattcgtcgacgtgttggatttgggtatatccgcggtgaaccaagcgagattaccgttgatagctgcggaggtgacgagcgatgagatgagcggggaaagtcgaacgctgagacagtccaggcatactgacgataatgatgggtaacccattgaatgggtacgtcagggtaagctttcctcaagacgtccgagacgcctctcactcgacgttgccaccattccagtcgttcgctaccatatcggcctggtgaacccgaaccctatgaaccactccgctttctgcgggtacagacttacctggacagcccatccatcgtgggccgatcgttctcgagatccagtctcaaccacctcgctgtatcccacagacaagagttcacctgaatgagatcaggcgatcttcgagctcgtggagtgtctgtattctgggcgacccggtcggcctcggtgcggcccagagcagaaacgttgttattgttgctgtcgttcatggcggccatgatggattgcacgacgggacgaagaagccggtcgatccggaggtcggtcgatatcggcggaatgactccgtcctgagaagttcagagaagacgtttttgtccgcattagccgcttccttagcactgttcgagcatggcagaatagccatgctgtactcgccttgaatgaccaatactaccgggcccaccccgaccgtccgatccgatcgtccagcaaatcagtccatcctcacactcaaaggccaatcgaactgccacatacactcacgtccgtcaaatccataccatactgatgcacatgtatgatcaagaagttcatctcccggagccaacagacatgagggaggtgattcctgttgccgggtggcttcggcctcctgtccgtccatccctcttcccgatcatcagggtcgggtggtcgatggggcgtatcgtacgggtcgacgttatgtggccagggaacgccgggtctcgagttccaggtgatgggtttgatctcggatccaatgaactgcatgtcgatcggacaggtggacgaggggttaaggtcagtcagcctcgttgcgtgaagcggatgaatgtcgtcgtgactttgggaaaggagatgagggggatggactcgccttgcaaaaatgatccatattgtatcgtaacacgctatcgccgtagagtacgacagtcttccccctgatccagctcaaatccggttccggatccggctcttcatatgttccaacgtcctctcccccatccctagcacgctccttccgctcatccccactctcccgacctcgtctggtcatattcacgttactcgcccgcgtccgtctgatcctctcgacctctaccatgacgctcctcatcaaccatggcggacctcgagcgttgggatgaggaaagggttcccaccggttgaggtgcgtgtcgtacttgtcgacgacgaggtggcctgggaggttgtacgggttggtactactcgtacatagcgtggagactgaccggaagtgtgggcaaggagcagcgatgtgcgtaggtgtgaatatagagatgtgggatgggttagaggttgagacatcagcgtgattgtaatccggggcatcgggtcaaacgtggaactcgacactcgcctgataccgctcggtctcgaccggcttgacctgaaaaaggcgatgttcgaggacgatcatgatcccgagagtgcatagtagtaccagataatcccgcagagaaacagcaggagtgctgtgacggtgggccatccttttcgcttcctcgtcatcatcatgctcctggtcgggctgatgtatccggttcctggtcccggagcggcaggacgggtttgtgtgccgtatggcagcatgccggttcgagtactttctgatgaacagccggtctatctctcttgatgtcctgccaagaagccacgagtgtaggttatttgtgtatgtttcgctttgactggtttacttgatgtcgtgttttgaagggggaaaggtgaaacgcgagaaaaacgaaaagagggaaatcacgtgaagtcacgatcattaacaagtagaggtgatacatggatgttgcgatcccgccttacctagacattctactaagtagtagctagtaggtagtgacagtggtgagttatgaagtgttaccctcggacatgagcctctcgtataccctgatcccagctgggtaagaacaaatcgatcgagtcgagtcgaggaccgcattgtgacccgcgcgtttctctcatgtcgtccggtccgggggcaacatctgggtctaggatcgagctggtcacaaggcatatcttgtacgcttggatcttactctatctagttccggcttacgtccccattcaaacggctgtgtagagtcatttgtagttactcgaaacggacatatgcccatcatcatcaatagggtcgtcgtttccaatgtccgttgttcacgttggctctgacgcgcaaactcggccttttactcggtttcaggactgacactacatactctgcgtcctaatcatcttttctaaatacttccccaaacttgtgttcgatattctctctttgcagggagcgcagtcacccaaaatcccctcctacaggatcaaaccatgtacagtgtctatagaaacgctcctaaccccggtaatcggcgggatcatgatgatgagcggtaccgctacttaacgggtcctcacgctcgcctgtttgaccgcgcgatcgtgcgtatcaaggtgacccgatcgtccgaatctttcctggcccggaaagaggggacgatcgcttggttatctggtgagccggaggagatccgagccgttctcgctcatttggtcgtgaagccttgtgctggaggggaatgctcggatcgacgacagcgactaagaggtcgccgaggacgatgcgctgaatgacgccttcatactcctcgtcgacgcgattcagtgtcgactgtatggggagcatgagaccggattcgggacgatcaggttacagcttaggagacggccatcccccggcccagtccatctctatggctctgatcgcggcgacggaacgtgtacatctcggcctctcccaccaggaccgagcgtcgtcgggatcatctctgaagcagagtcacctcgcgatgacgtaggaaccgccttggtggggtctcgatgatctcgaagagcacgagttgaggatcctctcgtatctcactccggacacgtctctacctgtcgacccggaggtcattgaatgtcttccaaaggggttaggagtcgtcgaggaccctaacttggattccaatgactggaagacccatccgttgaggcaagatgggccggatacgttcaccctctgcgttgttgccaccaccggaccggaaggacgaccgatgccatcccatccccccaaatcgacgaatggagacaacgctctatctctcaggaactacggccagatccaactcgggatcgtagagtcgctatgtttcgctgctagcaaagttgtccagtatcgtgacatcaacttgggcaacatcatgtggatctggggaaaaggtcgggcgatcggctatctcgtcgatttcggtaatgcgcgttacctcgacgaccctcgtcggacagtagtgcccgatggtcctcatggcaaggaatataatctctcgatggaagatggtcgatccgggatgccgacgttccgtagcattcacaccagtcgagtcgaggcggctggtaaagaatatgagaaaagctacaacgagaccgcccgaaaggcggcccttgtcgacacggacaaagagtacaaagaggaacgggaaaaaagaattcaagatgtcgccactaacttcaccgatatatcgatgatgtggcatcgacaatctatgccttcatggtacaggtgagtgaatctggtcgcatcgccgtagctgagagcgaaagactttcggtccagcttagcatgtatgcatttacgggtatagatgagctggatttatgggatcgatcccgctcaggctcaattcatccaaggtctgaaggacgagtcggagaaggaagaagtttggaaacatatgaaagtgagccgacattcaccccggccagggtcttcggcaactcacattatcatcgatatgcctcggcatttttccggttggatacgctgtaggtgcttgaaggtttgggctgcggagacgtttggttctttttgcagcgcaggctgtccaagaccgtccggaccgcccatgaagagttccgtcgaactctgctcgaggatggatcccccctgtcggttccggtcgagatgacactgatcgagaatcagtgtttcgctgattgcgtcgcgctcatcaaggaggctcttccaaagctttcggatgacgggaccaattagcttgatcggggtattggtgagttcaagaggctgaaggatgtcactgtcctcattcggccgggctgacgatcatggcgcccgtagccgaccttacctacgggggtccgatcgcaacgccttttctccccgactctacaacgactttacgtcggcgacgaaattgtgacctgtgtacctgtgcaccccatgcctcattaaagtagtaaccaccggccactgaagctacctccatgctgtcatcctgcatatgactatgatcgatggcatgtgctacatatgacccttgctctttgcctcctcctctgactgcgctctacctgaggtcgattacggcattccccgctccccggctccgttcccagtatctgcacttgcatacatgtgtgcatacttcgacttcgttcatccactcgacttgtgtcctaaccatcacctccatccacaaagccagatctaggccttcactctgacccggtcacaaagcctatcatcgtcatgttcaaaaaacgcacgcgtacggccaacccgcgaaccaaggaagactattcgaccgccccgtccggtgtagccttgcttggagctggtacgaccacgacgaagacgaccacagattcggggtcggtcgagcaggtagaagaggaggaggaagcgacgacgtaggtccctgacgtcactccggatggggctcccgatctctcacgctcatacctgcttctcgaatgggcacgacctcagcgggacactccaggagattttgctcctacgtaaactcgcgaaacagcaacagaatgccgggatcgacctggtcaggttgaacaagggggaagagaagaagaagaagaaaaagtctggcaagcggaaagaaggcgaggatggggacgggcaggccgaggaggctgaagaggagtacggattgaagcagagccgagcgggcgcgaacgaggatgctggggacgagtgagtcgggcacgaggctcatctgataccgaccgagtgtaccctatatgctcacgctgtgggcttctgtcgacctgctcgtagtgctgaaaacgacgacgcatccaaagcacgtcggctcgtccgatcgaacaatttcactcaacagaccaacgcgctcgatgtcgacaagcacatgtgagtggtaacatcgcggtttccgacctcgtcagcattctagctttctgaccatatgctctcctttccatggcctccccctgcactcgctcgacaggatggcgtacatcgaagccgagctcgccaaacgtcgcggcggtcaatccagccgtccgggcgccgaggacgggcccgacgactccaagacgacggcgtacgacgacccccaggaagaactgtatgcgatcgctgaaaagtaccggatcgaaaagaagaagagcgcggtgaatgatgatgacgaagggaacgtgacgacgagtttgggcatgttgacgagtatacccgaggtcgatttggggatggagtgagtttggtgttggggcgagaatcacgagccgggccggacgaacacgctgaccccggacgcactccgctcgtagtattcgtctgaaaaacatcgaagagactgaacgtgcgaaacgagcgatgatggagacccggggacatggccggggtcagaaacgtaacgaagccgacgaatcgttcgctgcggcgaggtgtaagtcggccccttggggggttctgctccgattttgccgaccgacatcaggacgactgaccgctggatgacctttggacgtgtgacgaacccacagtctatcgaccgcatcatacggtacagtccgacgccgaggcgttggaagatgccaaaagggaggtacaggggttaccccctatcaaccggggtcaacaacgggcgcgcaacgagacggctacggacgatcaggtgtacgagcggttcaaaaagaggtgagtcgggcgtcgtcgacgtcgtcgctgccggagtgactgggcggggtgtgagagttgtcacatttgatagctgaccaaatgtcatctctgaccatagggtacggaagaattaaccgtttacccagactcgacgtctcgtcctgttatttttgtatacaccctcaccaccaccatcgctactactgcttttatcatcgcattaccattatgaccaccggcgctgtgaacctggctcgactcgactcgggagtgggccaagccatgtaggctcggaagatggaggacgaaccgattcgcaccccttgttttcgcgatcgtttgagcgagttttcgtcgttcaatttcgaccgagtttcctgctcatggatcatgacactctcgaatctcatcttgtcttgcgaggagtatgatgttgcccatcttgtagtcgtcgtcgtcgtcgtcgtcgtcgtcgtcgtcgtcgtcgtcgtcgttgtcgatatttcgcatgttccccccctctttgacgcgtttctgttcgagctaggtcgcggaaaaaggatgaaagactttgattaggatcgaatgatggttgcgatgacttgcttgcttgtactataacactctcaattcattcatatcggccacgccttgacatcttggctagcgattgcgagacgctactactaccgccacagcctgcctggtcatccactcgtaccccgtcggacatcatcgtcgccatggacccctcagctggacagatgaaccgagctgtaccgccaggtgcaccaccacctcctcctgccatgaacatgatcccacctttgccacccaattggtctgaacacaagggtgagctcgtgtccgattcaactttcccagcgacgagatgagcatgctcagctgacattgtcgagccggtcgttgattagccccgaatgggacgccatactattacaacaacctgacgaaacagtccacctacacccgaccccttccttctggtgtagcaccctccttcccacccccctcggtgggcacaggggggaaggctccaatccacccatcaccccaaggtcaacagcaggagcagggaggcaacagcggatggaacacaggcgctaagctccggatcacatgccgtcactctccacctcgcttccgtcttcccccccacattgcgctcgcccccctcggtcgtctagcgccatccaaccgagacctcacccaaccaacccttggctgatgacgcgtgagaggcggctccccctgcccctgctcgcccagacgtcgtccgtttcagagtcgaacctcgtcgcaaaaggaccacaaccaacgacgacagcgatagaccccatcatcctcgtgaatcaacgcaacagacgacaaggcggtcgatcgagttgaaagtttaggccgacgtcgtacggatagctagtgaaatcgctgcgacgtgtgcccacgtcagcatacgtgtcgagcagcgctaccgacacgattcatcctttacctgcctgtcccatgatcagcattgagacagagcttgtctacctggaacaatggccgttgagaacgagtactagacagggatgaaggtcgaccgttcgatttcacactggcaaagtcgaccctgacgttctcggcttcatctagagtaggtccatctaccatctttccgtttgggcccgacctgttacacacgaggaacgttccccgtatcgtacgtatgctagcgagttaaacgatgcctcgagattggtcactgtggtcatcactctgtagctcatgtccgcaggtccatattcggagcaccagaaagagaccgaccccaagcccatcgaaccggctatagagatccccgctttcttctgaaatagcagtccgatcgccctttttctaccatcatcgccgatatgacaacgatagcaacagtccagatcgggatggtcagatcagttctgacctagacgtagcgcgtcgactctagtgccgggataaagatgggttagacgggtcaggcgagcctcgtccccgtcttcttcaatcacagacgcgcgttcttgtaaaccagccagagatcgtctcgatactcgtgtcaacgcgcttggcccaaagctgcgggggaactaaacctgacgtgttcagtgcgaggccgaggatgatgtagagcgaaactccaggacagatcatgtcccgccctcggctccggttgcgtcctcgcggtacatgtctttagcatggtcgtcccctcagactcgggtcattcggctgtggtcatgttctgagacgagatttatctcaccgagaaaccctgatgaggaaaatatggagaatgcaaaagcccccccacagtaaatcatcctttctttcgataacatcacgtcagaattatagacgcagagccacgttgtcatatccggaggtattctccttcaggaccggcacctctgaaagcgcagatcgagctgcgagtcgccgtggcgctcccaagagccttgtcccaggtttatgatattgacacgagtcatgagaatacaagtcgatcttatacaaacggcgcacgtgtttttacaacttacaaattccgatcccgtcaacgactctttgtttctcgtttccattgatcacaaatgatgagcgcccctctccggcttgccacgtgcatcttcgaccatctcctcgacgacccgcctcccgatccactcgccgaacgtcatggtcgttatcatcgggttgacaccactcgcactgggaaagacgctagcatccgccacgtacagcccttcggtaccccagaccttcccgcgggtgttgaccacgctcttgctcgccacggaccccatgcggcaggttcccatctggtgtgccgatccgaaacccgtacggtcgagctcgttcccgtaggcttcggtcgcacgcaagaattcgacaaaggtctcgtcgtctgcccagctcgaagaggtcgaaagttccgccggcgtcggagtcgacggtcgacgccagaccggtcctccgacggtattggtgtatatctcgagcgcgcccatcgtgtagagcaatttcgccatcgccaggtaaccctgcatgatatgcgcccggtcaaacttgctaggctcgtaactgatctttctgtccccggtcttgccgtccacccagatcttgccagtgactttttccctgcatagaacgatgtggcccatggtatgcttgtatcccaacagctggagacggtattcggacgccccgcgaaagggctgccaagccattccaaaggcgggcatcatgtccatggcctcgagcttgactccgtgagcttgaccgtcgagattatcgaattcggtgatggccgtggtcaagatgccaccgcggcagggatcgacctcttctgcccatttcgagtagacgatcatggtcgggtgaaggtgcaggtttttcccaatgttggggttctgagagtgaagggggtgacacgtcagtgatgcggcgtgcagagctgaagaccatccgcacacgcaccttgagaccgcttcgaaggaggatgacagggctgttcaacgtcccggccgagacgacggttcggtccgccagcaccagcaacctttccttgacacccgtctcacggtcttctagagttccgaccgcgccgatagcacgtcggttgccagaaaccaaaccgagcaacccagacgcatcgtttgattcggaaaagacgacgcgctcaatctcgaacccgtctaagccctggacgtggatgtttgtacgctggtcccgcccggcatcgatccggggcttgagaaagacccgacaaccgctcatcttgccctttttcccctcgccgtcgaggaacccacggcagccgatcgtacagttggcaccgcatcgagcgtggtcggcgaacgatcccgagatgttctggggcacggatctgcaggcgtagccgagctgacgggacccttcgaggagtgtcaggttggccgggttgtgttcgtggcgttcgggagtctggacgttgaggctccgctcgacgctggaaggcggggcgaggaatcgagaatcaataccgtcgtcagaggtcgcgtgaggagacgcccactcacgcatccatacactgctgccattccttgcctaggaacaacctcccgtgcggatccttgactccgttcctgttctttctcttgccgacgtcgtccaaaaggctcttggtccattcttcccggaccttgcgatcggtctgcagacaggcactccagttgacccggctgccgcctccccaggtcgatccggcgatgatcgagatggcgctctcctccgaggctacgaccccgcctccctcgtacaatccgtccagtccttcagcttcggtcgttcccagcgatctgcccgcccggtgagggaggaaagcgccacccttgtcgaggacgaggatttcgtgcgtctgccctgccgtggtcaggtccggatgggcggccagtcggttggtaaacgagttgacgaacgaagaaccaccagatccggatccgatcacgagcgtgttggtgcgcaacgtcttgagggattcaccctggaacgtcgtcgtctccatccgagccaacaacgagcgtcgagcttcgagcacgtcctcgtccccgtctgccgagggtttggggtcgtcgggagtcacgtagccgacggcacggtagtactcggggcaggattgcatccagcagaatcgaagcgtgtgggagactcctcggataccggcccggatcggagccagcttcgagttgtaccagccgaggatcgtcttttccttgtccgcaggggacatgctggtgagtggggtcagcgtgccactgagcagcagtccccccggagtggatctgtagacaaggggcaaggtttgtaaatatcgggagatgtgtttggtgggacggtgacccctgtagtcgacacctacgtcaagatgttgaggaataaccgggtttcgcctcgggctcgttcaggaagtcgcttcccaaagacgtccgagaccagtgccaaaaaggtagggttctctgagggcaaacatttgagaaaggcaataatgtccgcatccgaagccggattgacggcggctcgtttgtgttcggcgaggaccttgtgggcttcctcgtcggtcagactcgggacgacgccgtcggcaatggcgatgagcgtgtcccactggagctcggacatggattcggggcggcagtttggaggcatggcggtggaggtgttcttgtgggtttcctggcgaggtccgcggtgagtcgggcgacgatggtttcagggtgcagctccaggcagtaatcgggtttgtgcaagtgtggcttttatataccaatggcatgattcgatcgaggtgaggttcggtagtagctggcatctcggttatcaccgagagcaacgtcgcggaagctaatttccccacttttcggaagtatttccccggataaatctgcttccgatcatcccgggatcatctccataaccggttgatgcaacgggcaaccatgagcagctcgtatacttgaaatcgaccccgacctcgacctcgacctcgagctgacataccgatacgtccaattgcatcctatctcactcgctacttatacctctacagacattgcccgcgatgccccttctcaaagtcacccgccctgccgacctgtgttggcagatcagtttcgacagcgcacccgacaaccgcttgaccgatgacatgtttgcccagctggccgcggccatggatcaggtcgagtatgaatggagatcgcaaagtcagtgcagtgtcgaactgcgagtctttcgacgtgtgctcgtacattgacatctcgacgtggaaccccgcgggacagacaagtgggaagggttctttgacaagaagagaaagggaggagccttgatcttgacgagcgagattaccaagtttttcagcaacggtctcgatttcgagaattccatcaagaaccccagatttcatctaggtgggtcgcagacgctcgtcagtgctcgtcgatgtgcaaaccaggctgacgacacgactatcggcacagacatcttttccccggtcgccatcaggttgttgacgttccctttggtcaccatcgccgctatcaacggtcacggtcagtccagggtctcagtgtcgggctctaggtgagcgttgacgtctcaagctcatcgctccgccgtatccagcctttgccggagggttcttgttggctctgtgttgcgattacaggttgatgacggacgggaaagcttggtgttgcatgaacgaggtcagtcggcgtgtcgtcttggcgcaggtcgatgtcgggacgatccactgacaatatcatcgcggtgcaccccggcccaggtcgactttggcgcccccttcccaccctttttcgcctcgctcctctcggccaagctgaggtcccatcccaacatcctcagggacgtctccctcgccaagaggttcaccgcgcccgaactccacaaggccggcgttgtagacgagatcgtacccgccgccggattgcacaagagggccatcgagtttggtaacgagatcgggttaaagtcggctcaggggccttgggggttgatcaaggtgggtctcgggcgggagtgacgttcaggttgtgcggcctatcgctgaacgattcgcgattcgtgcctcgcttcgataggaagaactttattgggaatgcctgcaacacgccaaacgcaccgacggacccgtcatgccgcatatcgcagccaaggcgtttttcgatcgggtcggcaaggacggcaagggtagggtcgaggccaagttgtgaggcgccccgacggcggcggcggcggcagttcgtgcaggggatcgaggtcgggatccgggtccgggtccgggtccgggtcgtaatcaaagaatatgaaaacgcaatgcaaatgtatcacaagtcgatcacgaaaggtcggtcggaaaagcagacctttgagcgcgcccagcgaaaggtaccggtctcgagtcaagacaacgtcgttggcagaggcttatcccggggctaacaggctagccaaggcgatgcataggtctgtctgatcgcggcaaacgattacatcgatgcgcgatccaaagcaagagggcgcgacgcgtcaagtcggcaaaacagcaaaaagtattgttcccgctagccgagtcgaacggctgaccgctacatatcatcaactggttgattactagtgtagcgctctaccactgagctaagagggacttgcttgtcaaacacgcttctaccaacaatgattctcatacatcgacgcctgcggccggccgtttgcttatgccaagcccgttggactgctacgtcaatcccaaacagtcgattgcaagagaatgcccatgattgcgagggcaggtggatgatcgattccatcacacccagagccttgccagcctcgtatctttgttgtggaccggtataggctgggcgagaacaagaggtgacggggggaagggaggcctcccctgacacccgacctcgatatccgacctcttcaacctcgccagggttagacttatgggttagaggctacggtatttgccgtggcggccaccagatctaggttagggagtgaggagcttgccgacaaactgggaagaacagtcacgactacggaaaaggtcgactttgacctcgctaagaaaatgaagcagaggttctgggcccgggctgcgccttccacattgcccgccaaactcatatccagacacaagggcatgcaacaacgtcgccgcaaggttcaagctagccggatcaacagggtctgcaaggagggaagcaatggtgtacctatcaaattgacagttcttgagacctctattgaccatgaccgttttgccaaagaccatgttcctgcaatggaagctggcgacaccatggctaagataacgtcatcgctctcagcagaatacagcaacgagcaacaaagatgacgacaacggtgatcaaggcgaggcgggccaaaaccccattcggccaacgctagggggagggggcgcaagagcctccgtctgctttctgacgaacgcaagtcttgccaacaaagcggcctgtctcgccctgctctcttcttacttaaccctcatctcctcgatctcctcttaaacgaccttgagacgactttgagctcttggtggatgctgcatcgaggatcacgcggtccccctcctgatcatatcagaggctgcaggtacgtcctatacaatcggacctcctcagagcggatgacactttcggagcgtttgctctggtgcgtgcttccatttggccaaaaagatgaaaagacgcccgcgcggcctgatgttgtacgtcttgcatctcgaccaaccaaacaaatttcacgattactcttattcattgatgagcagcacgctcaagtcggtttactcgagggctccaagcagtggggtaggcttccatgcgataagaggcgcgcaatccaagattttctggttcatgtccgggtgcccaatgtcgtcgtcatcgtcgtaccacactcacaaaccaagcgactcgcgctgcctggctatggtctttcgctcccccagtcttcgtatcctcccagtcccgaacgcgccaccccgttggcatgaattgcatccttgttgcttcccgactttgatattgataaagctacccatctttagcccaactttatggcgttttcggatccatgatccatttgaccatagccctggcgtcggtcgatgcacttgatacatccactggctacatcgactggtcgtcggtcaacggcagtctggattcagactcaagtcaagtctcagctcgtgccggtggccgtgcccgtgctcatgtcctaccatgaacctggacggactgacacgggcgtggcacgtagcctttgacgtctcctgtgggcggaattgatacgcctacgccgggcgctcggctccttgcgtggtgatcacgtcgagatgtcgattcgcgtatcccttatccctgacgagatccttgactcgctggtgttgaagcctcgcgatgttcgaaccgtctcatgcgcccacacagaaaatccctcaacaggagctccttgacgcccaacgctactttagcagtccggccgatgtgtcttggtcgaatttatcacgcctgggcgtccaatgacctcgacgatcccacgagacgttggagcaaactaccagagagtttgtgacaagcgatgcgttgcacgattgatctccacttttcacagcaccgtgccaggaactctgacctttgtttgacctgtctgtgtcgctcctgcctgcgtgtctcgtccgccatcccgctctccaatatcggctcgagtctgcacaacgaaacccccagaatgggcaaggtatcctccagctactggcattgttttattaatcggtaaaattgcgcgtgttgacggttcgaccatctctctcccaggcttgctataagattcgagcttgtgcgaaggcgcactgcctgccgtgttcgccacaaagcctccgcttgtcaaaggtgtgggcccggggtgatagcgcaggtagcttccatcacgacatgctttgcatcacgacatgcgtcgcacacacccaatgacttgctcccatgaccggcgccgagtcgagcgggttcaatgaccggtagcaagccaccaatcactgcgtttttgctgcttcaatcctgggaacctccacgccgcgtgcattaaaacagcactcacggacaaacaacctagagcaatgatgaaacctgcgacatcttgtgggtttcaggtagcgacaccaggtcattcagagggcggcctgcctgccgtcagaaagatccaaccaaacctcctttccccgttcactttcacttcccgttccacacgcggcctttcgggattctatacgcaatcgcggatacgtgcttcaactgcgtctccattccgtgggcgatgtcacgttgggctcgactcgatacgcagagtcatgcctatcgactggggtcgctcgcctcgagaccgttcctcaaccgactgtagcgtgcacccctcggtcaacaggacattgtaggtccagacctgcacgggcctctcctccataagttcctgatcctctcaacgtcaacgatcttttcaagtgagaatgaatgctacgagtgagtgctacgagcgcggaccacgacgtcacccttgtgaccggctgattcccgcccttttccgtcgaggcagacgagtgaatgctgcggaaacacgtccgacaaggcaaagctcggactacgaccaccagccctatcggcgatcactgttcacggtgagaacgtggtttggtcccttttcctttttgagcgtgcgagaagcttgcgacggtcacccgtggcctacgcaggttccgtgtgaatagactcgcgcggagaacccaccccatacaacctcgcgactcgtcttgtcatggcgctcaggctcgacatgtcactcctggtcagctttgacgatacttgcgtttcacagacaccgtacacaaacgacgaggatctcttcagacgaccacccagtccagtgtcactgccgccgggaaagatacattgagtgacgaaaaatcgcgaatcgcggatcgaggtcgacgtcatcgcgagtcgatcactgcggatgcacatttcaatcgacccggaactttcagctcgggctttggactctctgctgacgccccgaccaggtgtctagacgtttcaaccgaggcacagggggttagagggaccacgcgggatcaatcagctgagagggtcccattgatgggtggattcggtctaagcggtggctgttggagcgatgggggggcaagagacggaaggataccagcgatcagagagaatgatcagcgagtgatcagcagtgtgatgatgcgtttgatgcggtgatgatgatgatgatgatgatcgacgtcgcgggtcctttctgatcttggagccaatcaaaaccgagacttgatccatcaaaggccaagcaagaagagcaaacacagggatgatgacgtcgcgggaagtgaatccgttcattgtctgttgtctgtccacgacgacgacggtgtcatcttttctcttttcgagctgtgacgtaggtcgtcgtggtccataggcaaggtggtcacctagttgcatgccagggcggggtcaccctttgtaacgatcatgtgcagcacgagtatatatgacctgatgataccgttgtcaaacgccaggcccccgaacgcatcgcttccattctccccgtctcacacacgcaagccactcgagccaagccactatcccgcacacacctacactcacacttctcgaaaccaacctcgacaacgcgacaatgctcggccgacgcaaggaatccgtgggcaccacgacgaccgcctacactggcgagacccgtcgacgtccctcgatcaattacatcttggcctcgctcctcaccgtcgccggagccgtcctcctctggttgtgcgcgttctcgaccccgttcatcaggagcatctactatatcggtctcgccgatggcaacgccgaccgactcggaacatttggattctgtttcaggcgtggtgtcattgtctgccaacagaaagtcggggtgagcatcacgtctgggaacttgacctgacgccgccggcctcgcagctaaccgtgtcactcgtggacagtacaactacccccttatccctggtaaccccgtcgctctcaccggttccttgatcatcaccgccatctcggccgggatcgccagtctggcctttttcggtctcctctttgccatctttaggaagaggggtggatttcccgcgttcgtcttgaccgtgagtacatgcatttccaatgaccaaacgtaggccaccgactgactgacattcaccccggatgtactatcgcagttcctcgctggattcttggccctcgtctcctttgtccttgccttgatcgcctttgtcactttgcacaagcgactcggccgaatcaacaaccgtccccagtatggtcctgtgagtgttgctcgagtcgggtacgacgacaagtctccctactgaccccatccccaaccgatctctcaggccctctggatgcacctcgccggtaccgcttgtctgctcctcgccatccccttggtcctcctcggatggatcaggcagcgcaagcacaagcacgagcaccaggaagtctacgtcgcccccaccccggtagtcagggagacctacgtcgagcccgcccccgtcgtcgtcgctcccgtctcccccgtcagggagacctatgtcgcgcctgtctcccctggtagggagacctatgtcgccccggctcccgtggtcgctgcttactcgcccccgaccaccgcttacccggaagtcagggagaccacgaccgcttacaagaccccggccaacgaggccgtctttggcggtgcacccgtctcgaccactcgttacgggtccaactattcgggtaacggggtcaccaccggcgtcgactcgtacaataccaacaatgcgtacgccaccaaccagaggtcgtactcgggcgtcaccactgcgcccctcgccgctcccgttcagcccagccactacaggaacgacggccgatactaggcaccaccgggcttcctcgttatctgacttgattattatttataatgcacttttccaagcgacactttcttctgtgcgccaacctcaaatgtatcaaatcgaccgatcctcgtataatatatacacttgtagccaacctgtcctcatgcatacacggaacatgacatgattcccacccagacgatccgattcgactcgcgcgttgtcggtccatacgacctctcctgtcgcagactcaacccagcatgaaaccctctggcaagaccaacccgctccttctgatggccacagccaggatccccttgacgacgtccttgttggtgagatccgagacggaccctgcttctaccacctcttcggccatgcgatcgagtaccaccttgagacgcgcctgttgatcgaccgagggcgtcaggggcgactttggtggtcccgctgtgatcgtcgtggtatcgggaggtggtatcacgacgaccggagccggtatgggcgccgacaccggtgctggagaggcagacgtctccgcggcgtcgacgttgatgacatgggcgggaggatccggtttcttgatggtccgcctcgcgctcatcgtttgcctgacattaacgaccctgctcgccgccgtcttgccgaggggttccttgaacgagatgtccctcaatagcgccaggtcgtggttgagtcccttgcattgcagccgcgtgtcccggggcagggtcgcaaacagccgctcgacctcggcgttcaggatcgggtccgacgtcgtctcttccttgtaacccgcgagagctcgactggagcaccaggcgtacctgcgacgatccacaaagatcagcttgggcgtcctgaaaccgacgagtctccgatccccaaccgtaacgaaccagttcatgttggaaagttgtagcacgtcgtctttccacacgcgactattgttctcactcctgaactcgcggctgagcttttcacatcgcttgacattttctataggcaaggacacggagcgcaccggggatcagctcgaatgactgggacagaccgagcacgacgcgtgcttgccgactcacgcgggctgacaaagtcgcaagcaatcttcatacagtcggccaggttgcacacctgatgggcacaaccggccgggaccatgatggcttgcccctgcgtccacggcgatcgggtcgggttcagcttgaaaatctgaccaccatatgcgcaagcgactcaccgtgtattggtaaatacgatagctatagatccccttcttttcaaacagttcttgtcgaccttcggaatcgaggtaaaactgctgcgaatggatcgggtccgtaatcttgtagagcccagcatacttttcgagcagaaactctcgaagaccgtcggcgtcttctggtcggaaaatgtcccaaacggcgcagccaggtgacccatcttcccgcgggttggcgtgcatcaacacgttgatcgcatcggccatgtccatgtgaaggcgcgtcctgagagccgtcgagcggtgtgcgagtttggctattttagcgggcgctcaaggcggtcgttctgccatgccccggtctgactcacgatccacgtcccccgggaccttcctcggcagcctgcaaaggtgcggtagagtgggtcaatcacggatctgtgggtgcggattggaccaccttgacctacaaaggcgttgtacatcttgggtccgatatcaggtactccgcggagatgagggaactggaagtgcagaggagtcagctcgagccgcacgcgcaaaaacccaaagccgacccacatgcgccgagatgttcagtacgccgtcccgtcgggtgtagtctggcacgggcattgcctggtgaaaatcgtcgtagagatcgggaaacttttcccgaaactcggtatacgccggccaatcctttagctttttcacgatgcgctcggtccgctccggacccttgatgtattcggcgaaaaagtcggccacgcgcatctctgtcagactgccctcggcaccctcgtgagcttgacaatcgacgacgtctgcgggttcaagcccaggctgtcagccaggcgtactactagcagacgcgaccacaagccgggaacctacaacagacttggtcccggtcgtcctcgttcgtcctctcgtaaaagttttgcggcgtccaatccagcctgaagcgttcgccgatgccgtctaccaccaaaggtacccccttcatccacatggcgtcaaagatcggacccgagagcttgtcgtgcgataggcgaaagaacgaatgactagcaagacccgctcgatcgactggctgagccgcaaaagtctggttgctggtcaacgaggacaactcgtcgacggtcaccgccagcgtggcacgcgaacgcgtctcttcggcctcttgtcccggaagcggcgacttgtcaccccgcatcatggcgatcgatacggcttgcaaatgttgttgaaaaggtagggccaggtccggcaaggtctcgccatatgctgtccggctctgggtgacgaaaccgaccaacgcagcccaatcctttttgagctcgatcggatcataccttgtcacgggaatcatgcaggagccaaagtgtaccctggacgtgccaccgatcttggtacatcgcagcagcctcgtgccggcgtccttttgccagtgcatggccgagctttgcagttcgtcggggtgcttgaattcgaacagcagacgcttgcaatcgaggcagtattccttggcacaatggctgcatgaccagcttcctccaaacaccgtggtagcgcaaaagtcgcacacgagccggctctcatcgtcgtctggtttgcaaagcgctccatcctgtacgacgtgctggacctcgcgagcaaacagaggcaagagccatcggaccacagtctgctggaggtagaacgcatccggcgccgtggggaccctattgaattggctaggtccgggaaagtgtagagggaccgggggttgaagcggcacgttgccaaagtacggttgccccgtgatcttgcccgtgttgggatcaatgggaaagagtctccagttttggaatcgacacttttcatacgacgtcttggccacgcactgtccgcaccgtgggaacacggcgtatcggttagctaaacacttgttatcctggaccaacgtgttcggaccgaggtctggcttgtaatccgttgattctagcgggtcggggcgagcagtcagcagaggtcccgagggtgtcatctttcgatcatcgtgcttactagattttctccctccggtcctgtgagcgtcagatctcgtcccatcccgaccgtgagcgtgcgcctgagcatctgcgtcgatcgagcgcgcaaggtttcccttcaagtctatcaagtcaatctcgtaccgatcagcttcagtgttttgcaccgaaagaccggcgtctggctcacatgccgcccgtcgaccttcaacactaccgccctgcccatcgatggccgagtcgagtcgtcttcgcgtcgcgtcgctgacaatcggaccctctagtgtggtaacgtctggcgaaccagcgtcgtctaaatcgccgagacaccgcctggtcagctggaactcggagtcgcacccggtacgctcgactcacatcggccttgcagctcgacctcgttgtaattttgccgctgtactttgcgtctgccgtgtatgggcgaagtatacctcgccgacgatcgctcttcgtcatcggaatcgctctggacgacgatggccttgcgtttgaccagcttgtgccgttttgggctcgcccgaggggtctccgagtactcggcatcgacgtccatgggtctacgtcgcccgttgggcgtgcccggttgaatctcgggagtggtcttgccaggcgaggcggctcgtttcctcttgaccgcgggtgatcgtcccgggtcgacagcgtccacaaccatgaccgtcgactcggtcttgacgcccgcctgctgactcgcagcgatttcttgttccagatcgtacatgtcgacctctctcgacctgacctgctcggatcccgaccgtaccggtccaaacttttcgaccgcctgatcgatcttgacctgagcggcgtctgatgccatccgtttaggtcgttgagccgaggatgaccctgaaccgggtctcgaaccgggctcgacgctcttttgagacctacgggtctcttgatcagcctgagcgatctgatcgaccagccgggtattgggctttcgttgacgaccggatttacgcggctgatccgtcccgccgttcgtgaccggctggacgtggatgatcagaggatcgtcatccgagagcgaagtcaggtccgaatcgtcgctcgagaacgatcggtccggtttcttcttcttgacagactggggtggtgctccttgctcctttttgatcgtacgttcgggggtctctatcgtctcgccatcgggttgacctttcgttgacttatcgttcttccgacgaggcagagtggatttcgacggaacccgtagcatctggtcgatgttccggtccaccgatcccctccgaccggtcgaccccgggatggcagccggcttgggaggcaagacgatgatctcgtcgttcactcccacgccaccgtcgttcgcccgctcgaccacctcgctcggactcgtcttcgacccgactttgtgcgacgagacgtcgatcgattctcccgcgatttccatagggttaccgatcgtcgtgaccgagggcgtctggaccctctctgcggctgcacggaggagcatatcgatccccccggcattgttactgctccctgaccctccgagcggtgatctaggcgaggtcgccgtcggtgctgatgtcacggtcgtcttggaagagggacgaggatccagaggtgcagagctgggtcgagggtgtccgtgcccagatacctcgggtcgaccgggaggaggacggggcacggcgtgagagaggggctcggtctgagggatcctaggaacgggacccgaggaagggcccttgagttccatcttggctggactgtcgaacaggctcgagagtttgttcagggacaagacctgggacgagttgggcgtgggagtgcgcgacgacgatatcggcccggaaccgcctagggatggactacggttctgtatgggcgggtgatacggctgacgtccgtgattatgaccttccttgttctcctgcctcggcggtggtcccgatcgagatccaagcccagctccaggtcctggtccggatggcggtgtatacgtttgacgaccatttccatccatccgatccatcgtctgaccttgagaatgtgccccggggtatcgggtgaaccctgacatggattggtatgccccacccatgcccatcgcgtgcaccttggcgggatcgacgccggatcccctctcaccgagttgacccaaccgaagtcgctgagctcggtccttttgcatacgatcgaacaggatctcggtggtgcctcccatggttcgtctttcggaaaagacgttgctgcccagaggtggatcgaaggagcgtgatgggggatgaccttcggtcgatcgaggttggcccggaggacaagctgacgacgatgtcgatgacgacgacgacgagccttgtgggtgacgcgatgggggtgtcgattgtgcacctagtggtaacgagccattcgatcgggactgatccgagggaccatgaaagagaggcctataacctgggtaagtgtaaggtgatgacatgaaatggaaagggacgagggacgtggacgctcgggattgtgatccgggccgagcgaaggtggacgtccgtcgatgctcgggatgttgggaggggttggctttgtgagcgagcaaagatgtgactgtgagcgtggatgtataagtgttattatatctatgagagagagagagagtgtgtgtgtgtgtatagttcgagagtatagttatcatagccagggtcattagattgatatatgaatcgatgaatccggcttcctcccttagggcttgtcctctttcgggtttgagcgaaatgttgatttgaacgaagcatgacctattcgaagtgaacaacgacgacgacatcgaccagggcggcaatgcaggatcgtcatgatttgaatgacactgcttatgacaaataatatgatagacgagcacagacagacgaagtgagacgcacacacacgacgtcgtaatagatggaggcgggagaggttcgccattcgtaagcggacaaagtgaaaaccaaatcggcggatcatccctggaacgattcaagcaaagagcgaaaaccagcgctcatcatcatcatcgtccctctttagaaggatcaatgaacctgttgttgttgtcgttgttgttgccgtccgggttgggccagtccacagccgaggtcggtgcgaaactggccgtattgatcatacccccaaacgccatcgacgcaggggatggcatggagagaccgtccggtgtcgtgaagtcgactccaccaccgccgtacccgttgtaagtaccactgccgttcccgtgtcctcctacatggctgttgctcgacgattgcgaatagatcgaggacggatgatgatgcaagctcccacctcccacgctactaatcgcactcggcaacattcccgccatgttcatgtccgtgtcttgttggtgctgtgcttgtgattgctgttgcaccttttgcggattgatcccaccgcccatgacatcggggccgatggtatacgtctgcccgttcaagaggttcggaggcggcatcccattgtacggatcttgctgcccgaactgcatctggccggcaacgctgttgttgttgttgatattgacattggtattatacccaccgaccggactcgggccgacgtacccggagtttagcggtggcaacgtcccatgccctccctggaacggactggccgccacgtacgtctgagggatcgccccgctcaccgagacggcgcgttgttgagggatcggggtgaaatgtcgcatccccggtgacctggtgtaactcctcgggatcgcgcccgggttgggggacatgtagcgcatccgactgctcgggtaggccgggatcgacgcctgacgtcgatacatgaaattgttacgatccggacccacgctcgacgatgccctcgcatagctcgtcgtcgccgtcgccgccgcggctgccccctgccccgtgccgttgatgatgcccaccgattgatgtcgaccgagaggaggtggaggcgggaccatgtatcccgctggcatacccaggttgggaacgctacccagcctggccacgggttgcatggccggacttccatagtacgacgacgccgaatcacctccatacatcgacccctcgtaacccatctcggcggccatctgatcgacctgagcttcgagcatacgggcaaactcgtcgtcctcggtcatttgcgtgctcgctcggtctccgcggtcgtggcgctcgtgcgtcctcgtgtgctgggtcaggttgtcgctacgactgaatcgtttcccacagcgttgacacacgtagggccgttcctgcgtgtgcgtacggacgtggcgtttcaagtgttcgagacgtttaaagtagcgtccacaggtgtcgagcgggcaacggaacattttgactcccggagccgtcggcgcagcgctctgccctcgagcaccctcggattcgacgctggccatcgaaccttgacgagccgtcgcgtcccgggtcgaatcgtctgcggcgatcgacttccacgtcgggccaacgtgggcagagggtgcgatggccgcgggcgggggtggcggtggtggcatcgacgacgaaggcgctcgggaaccgccaccctcgatcatcatgtcgggcgtctctcttgggatgacgggcttgacgtccgaatactcggaacccagtcgatcgggaccctcttcctcgtcctccaggtcggacaatgcttgtccaagggccgaccgtttcaccgcccgggccttggcatccttctttttgcgctgcttgtactgcgggctaccttcaaacagggtgaccgagaagggtcgattgcgttggtcgaccccggtgggcaacggcagctgaggaagaggatcccggtcgacctcttcttggccgggaaactcggagggcgggatggcgtcgccaggttgagcgggctcgagctgaggcacagaggtcaaggtcagagaatggctggatactggcatgtcgtcagaggtctgactcacgggctcgtgggtagcattgatggctgacaagtcagaggcggcaaactgctcgtacaaggtcttggtagggtcccacctgcgagatcgtccagggcgtcagtaagagcgatggacaacgagctgtaaagagacctacctgaaactcctcgcgggttcaccgatgatctcggtcgtcgtagccatgccctccttttctcgcttcaggtctcgctctagggcgtccaagaagagtctatcgtggggtaccgagaacctgtcatccagcgtgacgtcagatgacaagcagggatccacgcaaggtcatactctggctcaccagtagaacaccttttgcttcttttgcgttcgaatgcagccatatttgaagagcaggtccaggaattcgctctatcggcaacatctcggcggtcagcgacgtgagcagacgctcatccagcgagacgcggcttaccttgggcttttccaagctcgaatcctcgcctggtttcaagtttcgcagatcggaaaagatgccttcctcgaattttttcacgagggccgttttgaccggtcgtccgaacgcctcgaaacggaacgccagcgcgcggactacccggggtaacgaattggaatcagtttctaccgatgatgccggcacggcgatgcctcgggcttaccaatgtcggtcccggtgatcatgtacaggccgttccaataggcgcaggtgacgtgctctccgttgggtagcaagaaccgattgagtgccggatggggacatgatacgaacgagatgggttcgctggtcggactattgtgaaagttgtaccatggattttgttgcgtgtaggggtcctgtaatgtggacgatcgacgtcggtgatcgttggcatggacgaggagatgagtgaggactcacgctgccagtaggtacggtcccgtgttgctgccaagcagaaggcgccgtggcgagaaactgcaatgcactcgtggtcagtaccggtcgtctacccgtgcagacgtgagctcgactcaccagctgtaacctgacgagatgatccaccaattgagcttccctcgtcgtcaattgtctcggcaagaggtcgggcgggtacggcaacggcgtgttctgggccgtccatccgctacaaacaccatgcgtcggcggggaatgatcagcatgtagctctcggtcagaatctaggcgcgaccatccccgcctcacctgtccggatgcgaccatgaactcgtccccgtcgtcatcccactctccgccgccacactcgctcccgcgctgttcagaggattccccggacccgaccccgtggcgatcatgccggcgttgtgattgatgctggggttgggattggggttggggttgggcaagatcctattccccggtccgatcggtaggttcgtcgacccgctaggtcctgccgtcccactcccgctcgacccagcgtgcacgtgatgtcctgggtaaaagtgcggaggaagtgtaccgtgaggagggaactggacgttactgctcgaattgctcgaatacaccgtagacgggttcaaagggttcatgctcgtgttgattggacggatcgagggggctcccgtggatgatgacgttgaaaccgtacccatcgggtcttgtgcagacgcctgagcaccgggggtaggcaagggcaagggcaagggtgagggacctagacgagggacgggcgagtcggtccccctcgccgaagagatgggcgggacgaactgacccgacccaggaggtcgatgactgagcggacccccctcctccgagtctttcccatccaaccatacgcccgtgctcgtaaaaggcgtcttgcccccggcctccctgaactcgccgaccagggcgtcgatctcggccgtgttcaagcccgggttgaaggaggttgtcgtcgtggtcgctgcgggttgacgcgggtcgatctcgaggatgacatccgagggaggtcgtgctgccgacatggtagatgaggggggtaggttgggttcaacaacggcggtggatgtcgaggacggggtaggcgccggtgccatcgaggtggaagcaggggatgcgagcgacatctgcgtggacaggccggaaggtgagctcggtcggagaacactgtggagaggtatatcggggttgataaagatgaaacggggatgaaaccgtactcacgatgatgatcaagtcgagtgatagaggtgaatttgatgggatgtcgatgtggtccggaccgggtctgacgacgacgtgcctacgttgttccgaggcgagtactagggcaaggctagctatgtgctacgttgctagcaggtgcaagtagtgatccagagatgaacccttcctccgtgtacagagtcgaaggtgcaggtcggtttcagccggtttgatgggcaggtttcgactcccaaacgcgacccccagctcgtccgtcgtgcgtcgcagacgaggtccttgctgtaacggagctgacccggagtcgaagcgagttgaaaggtttctggatgtcggtaagcaggcaaaggtcttggtcttgatgacggatgtcgttgcccacgtatcagatcaggacttgctccgtgtaacgtgtacgtgcgtgtgatgttctaaagtactcgcttccgaccgaccagggtcaagcgaacaagggggagatggggagagatgttgacctgggtggatggagggtctgatagtgtatgaaagggagtgtctatcgatataggcgttggtgatggtcgactcgaggacaaaggatgatgggatcggtctgtcgagatcgggttgaactgatttccgctttggggaagatgcgatgggattgatggaggggtcgaacaccggtatcgtcgtgattactccggaccagtgaaggagagggaggctatgacgactagcactgagccgagagtgatttgaaagctgagctttgacgagctggagtgtatcgagtatgtgtatgttggttgtttcagttgtcaatgttcgtcgaggtgtgtttgatgattgaaacgggggaaagtcacgttcgagaccgggaaaaggtcgggatcagaccaaaaggggaaggtgagatgggacggggggggacaagtagaagcgcatcaggtgggacaagttggcaaggtcatgcagtgccaattaaccgaccggtggacactcgagtacccgccataggttgacaagtcatatccgcttgatcctaaactaatttgattgtcatagatgccatcgtcgaccaaaaagacgagatcacgttcgcaacgacttcctcgctgacccggtagatacgcgacctcggagccgcgccgggaacgtctcaaacggggatcacgagacgcgtatctcgacctcgaacatgcggcaaaaaaaggaacgggaatcgatacggttgcggtataccacctaggggaaggggttggtaggattgtcggaagatcaaatcgacatttgagccgtgataggacaagtgttcgacctccgggaggacgccggcggatgaaatcaccttgaaacgattaccccgcgttgctcagcggctaagcggcgaacagaaatatattatgaccttgaaagatgtcccattttactgactacaaaaactatgatcacacatcgagcattcagaaaaaaaaaattgcctggtcctcgggaccggtctccctatcacccacagcaacctaaccttgaacttttgcctcggtctgaattcaggcctcgctaccgacagtcctctcgtagtaccaaatagctaggtgaaacccagtcgattcgacacccgcatcagccgtatggtcacgaacagactggacaatctgtatgaactccgggggactcacgtgctgtggcattgcaagacgagttgccgattttgtcgataggaataaagtcgagctcctggaccctaccgacggcgtgattaaagtaccagactagagtcgaggcgtttacaagtcagcgcgagatcgaacacatccagagtgggagaaggatgccctgcactcactctcgttcaaggtcgttcggtcggtccctcggcatccgagctaaagcgcatgcgacgtcgacgtgagtacgtactgcacgggatcttgacgcgtgcaactttgggtggactcacaaagggaactcccccggacccgtccttgagagccttttcgatctggtccctactgtacgaagtcgtgttcgacggggtgatcccagccttggccagccattggtaggtagggtgcctcagctcgaactggtgcggggtggtccaagacgagtcgtcagtcaagtagctctcgcaacgaaatagaaagcgatgccgcactcaccccggcgacggtttggaaaaagtcgaccaagtcttgaccctgttcgtacgtaggaccgtaacacttgaggtcaaacgtcgaaaagcacgtctagtagagaaggtcccggaaaggtcagcctaccgatcgattcccccccggaagtcgagacgaacgagagaaactcacggcgtgcttggcaaactcgtgcaaccaaaagatgtaattgttcccaccccggctgacccagtacttgttcatccaggccaacaggtcgtaccgtccgaagaattcgagcgtaggcgtgacgatatcaccgcccgtaaaggggaggacgggttgggactcggtccatccttgggtgtagttgggcgagggcaccgggtcgtacctgtagtgggagggagggtcagggtgaggttcgacatggcgcaagaaagacaatcagacgaggaaatggtgtactcactgtcgagaaagatcacagtacccggggtacgttccatcacagtagctatgggcccggcgacgacgtcaaagtcagcatggacgtcttgtcacagatacgaacatcgacctactcggcccagaccctgtagagaatcgaaacagcgatgagcggggcactgaagaccgtcaatcgtgttcgagagcttacccatgcacaccccagttgtttttgggcaagacgatcccatcggcctcggcaccggtgtactatttccacagatcgccatcgcccccacgggtcaaccctccggcactcgcgcaagaaaagacctctcgccgaacccggactcacggtatcccagtactgcgtatataacgtcaacgaggaagcggcggtacaacacgtatcttcgacggccgtggcgtttcgacaggcagtctcggggagagagagctggcaggtatggttccgcgcgtccgtacggtaggtcaagggggagatggtcttggccgacaccgagagggaactcagggcgagactggagagaagggtgatcagggtggaactggcgagcatggtgagggaggtgcgtcgggtatggttcaggaaggtcaggcgaggcgattttgtgtttagttacgagtgacgacggggatagaacgtacttggaccgcgtccatcgttcatgttatatatcgatctcgtcagagttgaagattcctccgaatcgaacgtgcgggggcgatcacctcgtatcgacgacggcgaggaccgatggatgatggcgaacgggcctacaaactcgggaattgataatgtcttgcttgctcttgggggtctgatggctggatgttacccacgaggtgcagaggtgtacgacgggttatcgcctatcaaacgtgcgaacgagggcccggcgacgactagcgccgggatgtaaagacagaggcggggagggtgtagcatgtggagacctgaccttggaagagtacgacgatgggccgccgagctattgtgggtaacgagtgcttcgtccgatagagtcgggttgccaagacagggtcgcaataaaaaagtggaacgtcagtcaaccattcgtccagggattgttcgagacgaggctgcgatgatgtgctgcgatggctggccaccggtagatgagcaaagtagtgtcgatgtcgccggataccagaggaaacacgcctagctgacagcattcctgaaatccccagtcttgccatccgaagctacctttcgcacgtccggggatatatggtagaactaggaaggtgatcaacgatcgaatgcagcatcgacgatggatcagctcgacctcgcgtacggggaattcagaaaccagctcgtagacatgttgtgggttgctcgaaaggcttacacgactgagtctccagtatttatctgttgtcagaacgttgtcgggaatgtgaacggaagagtcaaatcaaactaccacgataacggtcaaacgttgcgttcatctcccgggaaatgatggcctggaaactttgctcgtctttacatggtttcgaccgagcatgtcttcggagcgatagcttttcgaaatttggatctcggcgtttcgcaattcacaaattacacatagcgttccacatggtcaaccctcaagacaggcaagagctacagcaccgtacttgttaatcgagtattatgggtttgatgggatatgatgagatgtggtgatgatgatggatgatatcgtcttgggttcccgaagagtctcgggtcaaacgatgatgatgagatcaagattcgtcatatcatcaaccacccaagcaatcaacctatacctatatggagatcaactaacgacctcgcccaaacaatattaacagtgtggctagcgtgaacaacttgagtgatccgggagatcaagccaagatggcaaacctcagtcaaatctccacgaaccgcggggagagtgagtcacaagggatcatcatccacctgctccaaacgaccgccatcaaactgacctgagcgtttcgcctcccaccctttgtctctgcctgcatccccttcttcctcctcgcccaggcgtcatgcatactttcccgctctcggataccccgacactggactttgcagagactcagtcggtcacgctcgaatggaagttgtccgggttgaaacacatttacgaggggacgaggggggagaccaaatcgtatgccgcaagaggaaaacctgccgatgcttcatgccttaacaaaccatgcgatctggttcgtttcgatcgataggaaatgcatcaagagcgccgtattcggggatccggacaatctgtgggaaatcatcttgtacgttcgacgtgctcggactcggggacgaggctcgacgtcctgctgatgctcagacaaccgaccgttcatccagctacccgaattgcaagtcgacgtcctcaattctacatcgaacaccgactgacatgctcgcccctgcccgatcaccgattcttctttttagccggaccgacgggcccgaacccaaattcggggacggcacccgttccaggtgaaatgtcatccttctacctctcggccgtgccgaccaaggaagaacaggcttcagggatcaagggaaagtgggtaaggaagggagtctgggcgttcaggttcgacgtcagggtgtgagtgctcgtggcgtgcgatggagaccggtaaaggagagtatggctgacagtcgacgagctgcggggtaggggtgggaaaggaggacagagtatagcttacaaggaagcagcgacgcacgtatttagttcaaaggcgagtctctccgggtcaccccccgacaatcgagttggctgacccgtgcttcatatcgcgcagaccgtcaactggggctggcaatcgttcgccaaacgatccacgctgtattacaacgcccctaccgccgttcgagagaccgactcgtttgtcatcacatgcaccgtcagtgccaactcgggtccacccgcaggagcctggttgggatacaacatcacaccgttaacttggcagatggatcccgatgtggcggcgttcacctacgcgcccaaggggttcgaagcgtccggatccggctggagaggctcggaaggagcttggaagggggtaggaggtggtaacggggccatggcaggcgaaaggatggtcgtccccaaagaactggtcgacgccgtcgcaaggacgtttgatcgcgaagtctattccgacgtcgaattcgtcctgcctgataggaagaggagaagggtcgttagcgaaggacattcagaggcggtcaataccaggagttacgtctcgaccgatgtcggagcttccactctgtcgacctcgccgtcggcgccgttcacgctacctggcaataccctgggcgaggcgactcctccagcagagccgagagatgatcagcagcaacgtcagcagcagcagcagcgtcgtgacgggagcaacacgatctgggcgaacaaggagttcttgaggaggagcgagtatttcgaatcaatgttggaaggaggatttagcgagaccgcaggggcgtcgccggtgagtctggccgcacctcacgaggacttggctgtccgctaaactgcggagtcgatggtgggtatgatagcccatacaggatcttcacgttgatgacgaagagttgcccgaagactcggacatggaggaagaatgcctttccgatgacgaccaggacgacgacgagacgaccactaggctcacgcccgcgtctcggaagctacaccagcccgggtctacgggtgtgggaccgaccaagacaaggattgtcattcgagacgccgcctttaggacctggtatgcgctcatctattacctctacaccgacgtcatcgtctttgctccactggcttcgtcctttatcaacaagcccgacaacgccacttcgagtgctgctagtaccaccaggtcgagacaagtagcagaccaaacggacaatcagatcttgaagggcatcaaggggaggagggaatggctcgagacatggattaccgagatggaagtcaggacagaaggaatgcaagagccagttccctgcagcgccaaggcgatctacaggctagccgatgtgagtacccgatcgagctcgtcccggttgccgaatctgacccgtagccacggttcagaaactcgacctcccccgactccgtcaacgcgctttccagcacatcatctcccagttgaccgtccagaattgtcctttcgaggtctttaccaatttctcggccacgtacgaacaagtcagaaaggtgggtcatctagaagctcgaatacaatttctcgactgatcgacccccctttattcaggtcgaaatcgcctttttcctacatcactggaacgagatcaaggattccaacgccatggttaatctctggcagcagattcgactcggcaggtttgacgcctttaccgagatctggccgcacatcgtctcgaacttgtctttcgtaccctcggctccctctaccgatcagtagcgggttacaccgcctcgtcttcacttttacgccatctttacgacctcgaccgacctttcacgcctctcaacagcctatcaagcttgaatttctcctcatcttttccacttccgttgtaatccgattgccttgtcctcagtgaacattcatatgtatttgaaatccagtgtacgcctgtcagcgattgcaagctttgatcgcaagaacacatgtcatctttcgccatcggttgagcacagggtcatcagccaagcctataagcggcgaagggctgcttcccatcttttctgcaaagcctcctcctttctcttttcctgtccttccttagaggcaaagtcagccggtccccacaagcgcttgaaattcgggctagactttggtttagattcgatcttatcgtcggtttctaaatccctgagagcctcagggtctatacctagacccctcaattcattcgcactgatcgcgttgttcggcttcgagcgttttctacggtggcctcgaattttttcggtgcgatccgattgaaactgagagacagggttatgatgagtgaatttttccagctgacatcgccccttctcttccatcgccaaacacgtaccgatagtgtaaatctagagaagcccgtttcattccaactgtacccagactgatcatcggtagccgccagagaagaagtatcagttgaggccgcggatcctccagtctatccgtgtacacaaggccctctgtcagcgagcgatcgatcaggatcggccgatccttgcttccacttacatcgacgcggtagagtgggtgagtatcagtgtatctactcgtggactgggattcgatgctggaagtcatcgtcggcatcacgctatgtagattagatccacgagtaaaaggtttggttttctactgtatgccgtggtattttccggattgtaccaatttataattgcctgaaaaagacagagccagcaggacttgaaacaggcatcctttttattgaagtgcggtcggcacgtggattataaggaggggtgcatgggacggcgatgagccaagggtatgttttggactagttgccctactgtgtgctgtttatgcggtctgcgagatatctaaacctcaacacggcttggagtggtacatcggcttagaccctcttctgtcagtgtcctgagactatatagcgaccctcaatgggtcactgagatgactctaggatatcgacgcccaggaagcattcccgttgcgcgtttcacccttgatgttctccgccacgaggctttgatgccatacggcttgaagagccccggaacggcccttaggcttagatggtagcacagcccaatctacccttagctagaatcgaagttgcggcctggatcgggttttggggtctagcatctgtgactataactcatggcgcaagcgtctccggggaaaagcagtcaaatccccgggccgttcaagatctcttcccggccagatcgtatcgcaatcggctcaactcggggctgtacctgccgccggtaggtcaacccccacaccgagcgagctaaggataagcttcgcgagctaggaagttcgcgccgagtccaggttccgactccccgggcccggaccgctcattccgttgactgtgagacgaaccatatcgatgcaagacgccgtgagttacgagcagtatgacaaatcaatctcccgaggtatatgttcgggtcggcgctaatgcctagtgccttttcttagctgggtgttagcgcgaggacgagttgagcttggcgacatgtgccgtgtgcgatcgagatgcacagacggaagctgataaggtcaggtatcggtagcgaaagctcgtcatcgatcgcaaggtccagactccgaacgttcgtcgaaatcgtcgagagacgagtcgaggcaagagtagactagtatgtagttgtgccgtcgacgtatcctaaagatctgatcaagctgttttgctgtggtctgcgggcgtgatgcttgtgatgtcgatattggaagcggaatgggctgtgttccagtctgacgatggatccagcggatcttcaaacgttcccagtcatcttgtctcgaatatgaccgaccaaaaggccaagcttttctcagtttaggcgcgagcgatgtcgagtcaatcaccgggattcgtgaccagtgatcgtttgatgatccgcagtcggtcgcatacctcggtgtttttttgccttgaatcgcgcaccgcgctctgttccctgggcgtgcgccacccgttatcgtgatatcccccgatcatcatcacgctcatcattttgatcatcattattcatagttccccccttctccttccttcgctccggagccgctgttccttgaagttccattgatccatcaatcagtgatctcgcttagacgacgaatccacatcagatccacgctaaaattcgaacgcgtcagacctggcccgtatcgaccggtctgacagcgactagctcttagtcaacgatcggaaccctacctgctagtctagctgtgtcccctcgataggcgggtttttaagtttagctccaatcgtcttgtggccctcgtctccctgctccacctccacgaatttggggtcactgcgtacagtccgacttgcctcgttcgtttcgatcgacgtagatacatatatatacacaccgggccccacgcctctctcgtggggaaattcattgtcatctcgacgcatagcatacctatctatcgctcacggatacctacatacctccaccccctgacaattgtaagaaattgccagagtgagactatcgctctcgacgctgttcaagggttcctgactgaccggcagccgtggttctagtccgaatcgaattcatccgcatctctcgtttttcaccggactctactacaacaaatttgtacctgcattacactcactttgaacgatcgaccacgaaccaacgtcatgtctgacgacacccaaaggacccctaacacgagcccttgtcgaccttcggcagtgttcgacccagacgcacgacgaccttccctcgccccgtccctggcgtgcacgttggtcaatttcgataccactccagggtcttcccaaggtccatctcgatcggcttcaaccgagcccttcccgatcagagggttgcaaatgacgagcatccagacagggtaccgctttgggtccagggaggaggacgttgagcctggccctgactccgatgacggggacgagcaggaccatgctgatgatggaccgaggagaggatcttcggccacggacaagacgttgttctccagatcgaccaccaacttgaacggcacgttgaaggggttctctccgctgaaaaagggaagccccgaggacgccggagacaacgccggtactatgaagacagcgagttcgagcatgaccaaagtcgattcgttctttgataccgtcggatcgaaaaaggacaagcaggaggtgctcgaggtggatttggaatccggttccgaccaggggaaaggtcgggacgagcgggacgacgccagcaagacccttcatcaggaattgagtgtggacaacgccgagctctaccggatcctggagaccgagggtttgatcctggacaagattgatgtcgacgacacggtcgctccgtgtaatccgccccggtttatcctggttgcagcaccacctgatcaccacgtcgacggagagtacgccccagtgcaccccatgcccaagacattttcgacggccagaaagaccgtcatcgtctgtctcgcttcgtggatcaccgtgctcgtttgcatgtgcgcttcgggcttcagtaccggagctcatgtcatcagggacgagtttggtttgatcgaattggaaggaatggaagaagaaagcgggcacagctccgagtgggtctggggtacctttggagggctagggttgtacctggtgagtctaggtcgcccgttctaatcggcacgggtcgatagctgatgagcgactgtatggatagctcgggttcgcgacgggccctatgttgctcgctccggcttcagaggtctgggggaggagacccgtctatctcgtctcttggttactcttttgcctctgccagattccggtaggtgtagagcagaatgtagtcaatgaactcgggctgatcgagatcctctgctctgcaggtcgccatggcgcacaacttttcgctcgtggccgcctttagattcttctctggtttcgtcggatcgtgagtcttgcatgtcggcgcctcgggatcgatgccgttgacacgttgagcaatccgttcagtgctccgttgagtaatgtggccgggaccatcacggacctcattcccaccgctcaatctggttatgcgatcgccctctacgcgctggcctcggtcgcgggtcccgccttgggatccgtcaccggaggatatccagtggaaaagctgggatggaggtggttgttctggatctacgccattgtctttggggttcatctcgtcatcatctgggccttcatgccagagactagagagaatatcggtaaggatcgaggtgtgcagttgggtttcggtatgtggctgacgacatccatccgtgacagtcctacaagccaaagtccgacatctccgcaagacctacccggatttggctggcaattgctattccccgtccgagatcaccactacctccgggaagcagctgctcaaagcgtccttgactcggccttatgtgtttttattcaccgagcctattacctacctgagtggagccgtcaatgcgtgagtgaggcactgttccactcactaataccgatgctgagcgattcgccttcatctagctttgcattgggcatgatcttcttgtccaacgaggcctttcctcttatattcggaagagggaatggtggacacctctggacttcgtgagtagcgtcctcgcttggccgcaacgacaatcactcgctgaagaagtccgctttcctcctcttgaaagatatggcgcaatcaacctggcctttttaagctacgtcttgggatcggttctgtgagtcaatctgtggtccctgtccagcccgagttcgagcgctgacaaatttcccctgcagagcctttgcctgccagcccctccagcaacgcgcctacatgcgatcggtccaagcgtcaccgactggaatcgcctcgcctgaagtccgctggtggttcagccgcttcgccgtgcccttgcttcccatcggccttcaattggcagcctggacctcggaccccggcgttttcttcctcgtgcccctgatcggattcgccatgtttggattcgcattcttctcggtcattgtcagcatctttgcctacatgatggattcgtacaagtcgtattcggtaggtcccgacgcgggtcgtctcgggtcgacgctttggctgactggcgctccccttgtcatcaggccagcgccatgtccggggttgtgctctcaaggaatttggtttgcgcattcttgcctttgggtaagccccgaccggttggtctagccagtcccgggagtgtcggctaaccggttgatcattccccccagctgctcgtccaatgttcaagactttgggcaacgaatgggccctgttcactttgtcactcgtgtcctgcttgttggttccgattccctggttcctcttctacaagggcaaggcgatccgacagaagagtcccttttgcaggcagcacatggacgattgaaggatggtctgcactcctcgacgtctaccgctcgttcttcctactgtatcgcccgagaccttccggcttggccttttagatttcgcgttgttgttcgtgcttatacccgtgtaccgatcgaataccctgtggtcctgccctgccgtcttggagcccccgaccaagtcgacccgacagcgtttccgtgcctgatgatcgaccgagagggacgatcttcggcgtccattgccgattgcttccggtcggacctccatcgagcacaaagggtgtataattcgggacaaagggcgaaggtgactggtattcgctagtatgaaggtataaaagcagcgtcaaggtcgaacgctcgcggtcgatttcggtagctacagtgtgctcgagattgctcccttggcaaaagtccatcacgatgcttacggtcactcagcaagcgcaggcagcgctctcgcatgtcaagcatgcactccaggcatcgacctcgcactctcacctgctcgaggatcaagcgtttgtcgacaggttggacatgaattttgtcacgatatacggtatccaatccgagctgtacggttaccgagccgactgtctggcgagcttggtcgagctggtgacgatcattgccgaatcatggcaagaacgaccggaacacctgcgaaagctcgacaagaagcgagaactggacccggaatggtttcagtcgaacgatatgctcggtgagtagcatagtcgtcgactgatgcctggaagactcgaatgctgaaggtccaatgatcaggtggagtctgctacgtcgatcgctatgcgacggacctctcctcggtccgggaacggataccttactttcggtcactcggcttgacctatgtccatctcatgccgctattcgacagcccagagccgaggaacgacggaggttacgcgatttcaagttaccgtcgagtcaaacctgcgctgggagatatggatcagctcaaatcgctggcgagagagtttgacgaggccgggatctcgctcgttctgggtaagctgacaggggacagacgactgactagcgattgacatgcgctgacgccgaactctgccacctttgtagactttgttttcaatcacactgcttgggaccacgattgggcgaaacgagcgtgtgcaggagaaaaggcgtatgaagagttttattgggtctttcccgaccgcaccatgccggacctatacgaacagacgaccagggagatctttccggatgaccattcggggagcttcatacagctcgaggacgggaggtggatctggtcgacattttaccattaccagtgggatttgaattattccaatccccgggtgttcaacgccatggccagggagatgctctacctcgccaacgccggagtcaacattttgcgaatggagtgggttataacgtgggatctgggaggatatagcggctgaccaggcaattttcagtgccgtggcattcatctggaaacagatcggaaccacctgcgagtctttgcccgaggcccacaagattttgcgatgtttcaatgccgtatgcagggtggccgcaccgtcgctcatcttcaaatcggaagccatcgtccaccccgactttatcgtgcaatacatcgaccgctacgaatgtcagatctcttacaagtgcgtcgttatggtcctcgtcgctgctggaaaagtgctgacatccgatcatcatagccctctgcaaatgtgtctgttatgggaaagtctggcaacacgcaatgtcgagctgctttcccaggctctggaaaggagacacaacctggtcggcggatgtgcgtgggtgaattacgtcaggtcgcacgacgatatcggatggacgtttgcggatgagggtgagtgtcgattcggtgtgtaacgtcatcctgcgacgttgctgaccgcgatggacatccaacacagacgccatcgagctcgggaaagaaggcgctcagcatcgcaagtttctgaacgcctttttcgtgaatcgacatccgggtagttttgctcgaggagtgccgtttcaagacaatcccaagacggtcagttcggcgtccgcgtggtaaacaatccagtactgactcgggcgatttacgcagggagactgccgaatcgccgggacctgcgcgtcgctaagcggcctcgagtcgggagagacggggtcggtcggacggatcctcttgatgcactcgatcatcatgtcaacgggaggtatacctttgctttacctgggcgacgaactggggacactcaacgactactcgtacatgtcagaatcggacaagtcggacgattcgagatgggtcaatcggcccaagtttgatcgagcgaggtttgagcagcgccaggaccagaatacgatcgcgggacagatatttgctgggttccaacggatgattgaggtgcgcaagggcaccccagagtttgcaggaggtcgtctggtcgggttcaggacgcataacccggcagttctcgggtaccagcggccgggaaaaacggccaccatcttgtgtctggcaaatttttcggacgacagtcaatgggtcggggccgagacattagcggccttgccggggggtgcattggacctggtcacgaatcgaaagatctcgacgaaccaaggcatccatctggcaagccacgagtacatgtggttaaagtattagatacttgcgtagattcggaatgtatcttcgtgtcgaggccgaccgttcaggttcatttgcaaaaggcgtcatgcaaaacctgatccactcgctttttacgcaagaaagatatcaagcacgtgttccagcggataaaggcgcctactcacttccaattgatgctccaagactacgaagacgaatcctggctcaggcaatgctgtataagactgacatcgacccgacttacggcgtccagattcttttgcttgaccccaacttctgagcaatctctttacgcgtctcgatcgtcaccttgtcgagcgcgtgcatgacgaaatgataagccatgtctttggacgtcggcttgaagccggattcgtcggttcctgtgatctcggtcttgacggatcgtccgcccgctttaaaagggctctttttcgtcttactacgggctgagcgaggagagggtgcaaagcttggtgggtagactcgagtggtagtcgaacggatgcaagctatacctttctttaccggcaacagtggttccgggctgacgtttggcttgatctctcgatcgggagacgacatgacgtttgctaaggaatcgcttggggcgcagcgcaatctcctacttgaagttggagtatcgttgaagtacagtgtgagacggccgcatcgtcgagaagattataataagtataatcgagcttctcagcgatgatcgcagatctctacagcgctgtaccggcgcgtctttgtcgctttcgtttcggccaagacctgaacaaaagcgcgcgcgtgacatttgaaacgctgatcatgggtcgaggtcggctagtgaacaacaataaacatatacaggaagagaaacgcgatggcaaggctcgttggagatggttcaggggcatgagaagctggcttcagaaaggaaagttatgtatcctcgacgaggacattgctcaagtcgaaccccggaattggtcctgcaagactttctcaactcgtttcctgtcagaacgcacaatcaaggtgagcgatatgatgagacaaagcctggatgcgccgaaattagttctcacttccaattgttgttccagctctgcggtcgatgtcatgttggcatcagaacggccgcatcacctcaccaccatggatgtgcttacattgatgaggtttgcctgtttgacacccagctcttcggccaactctttcttcattcctgccgacatgttgtccagcgccttcatcacccaatcgcaagccatcgccttggtcgtcgggttgaagccttgtttcttggccgaattgaggaattgtttggctggagtgcgtttgcccggtttgacaggtgaggctgtgcgagcgagaatgtgcgggggaagcaaggactcgagcgtctagcggttgagctcggatgaaactcactgcgtagagtcttgacttgtggttcatccttgacgttgatgtcaggtttgatctctggagtgttgtaatcggacatgatagatatgtacaattgctctgaactttgtagtactgaagtacaagtccagtcaactaaaccgggcggggatcgtatataagtgttcatgcacatagcttcttaccgtacaagtctgcgcttgatccgttttgttctcatcaacggggatcgacggatcgagagttgcgcgtcatggccgcggaggcctcaaacaatgcaaacccacggtgacaaagagacaaggaatatgttatcgggtggaactggagggggacgattagatgacgggaaagatgagcgatatccccatggtagaaagatgataacgtgtcgtaatcttccgccctagattgataaaggttctcctttgatcggaattcaacgagatgtgccctggatcgttgagcacaggaagcaccatgcgtcaaactttgcaatgccatacaaatttcgtgaggccaaccggttcccgcaaagctgtgcgaaggaacactgagcaagacctgcctaggccccgagacgtgtatgccaagtgtatcatgatgatccgttatttctctttaccaaaatggctacaagcagcccgatacagaatgcacatcttgatcgcagcgcatatggttgcagatccatcaaggttgttatgtttcataaagtcacgtgattcgaaactctgttcggcgcaatctcgctcgcaccttgcgaacaagttgaacaactttgaccctgaatctttgctcatggtgtcgcctggtataccactcatcccgaacatcatagccttttgcttcaagttgtgaacatttcataccatgggcaagacgaaatcatccaagaacaagtccggggctagcgccagggcgtccacatcggctgcagcagaacaaccgaccgcgaccgacctcataggtatgttcacatcgggttgacgtccgaatcgagttcacactgacagctagacctcgacccccacgttcgtaacaacagcacaagctcatgcgtacctgggacagtccaactttgagcaggccatcaatagtctcgccctggcgttggacattgaaactggcaacagggaagccaaggagatcttgggaatcgccgagatcgaaggtggagacattgacaaggggagggaggtgagtacagtgcggcggcattagacctcgttcgactcgttgacatctcgtatgattgtagcacctcgctggactgctaccccctcatgtccaggacccggctccgtcgacctacctctacctcgcacagactgcacccaccccgcaggaagcattgcagctgtacgaatcggccatcaagctgctcgagggcaagatatcagcgcaggacacgatgcaggagcaggtggaagaggtcaccaaggaggaactgatgaaagagtgcatcacggcgatcgtcgccatgatcgagatttggatgtcggatctgtggtgcgtcctgctcgtgtgtcgattggaaatgaccgagattgacgtccgccctttagctttgaaccccaggcatcgtctgaatgcgataccttgatcggcagggcgctcgccatcgacccaaacgacattgacgctctcctcaccttgtcctcgatccgaatgtcccaatctcgatcggaagaagccaagcaggtcatccttcaggtctcacggttggtcatggaggtcattgaccggatagacaaggccgaggaacaaggcgaggctgccgtcgatacggaagatgagccggtcggacgggaccgtttgccttcgatccctacgcgacacttgttgacccggctcttgctagagcatcatcaatacgtacaagcgctcagggtcaatgactctgtcaggcgcgaggatgagctcgaggtcgagggatgttacctggaaggatgggcatggtactgtcgaggcgaagcgatcgaagctggcgatgaagagggagccaaggagacattgccagaagaggacgccttgcccagcaagaatgaatgttggaccgaggcgttgagcagtttcatggagtgtgcttcggtgagtagcgagtgcgggtggtcgcggggttagtgctacaaactgatgaagttcggccctcgcagctacacgaaagtcaacaacatccggacgaggggattcttgcgcacgtgcaagagctcgtgccgctcctcgaaaaggctggtatcgtggtcgaggttgacgatgaggagggcgatgcggatgtggacatggcatagatgtgcgacgtttgtatatacaatgaagagccttattccatgacgacatccggcttgccctcgaaactctgcttgaccgactggatcgacgagtcgctaagaccgggaatgtctgataaccacgattcttcgatggcagatacgttgtgggcatagtagttggttgtcagggcctggagcgagtgcgtggtatcagccgcaggttctgaatctgtggagacgggccggcaactcacaatctcgtcgtacacgatcgtaggtacttttttcccgaccagtacggatgaagggtggatcttgagaccgtcctgtcaggagtcgacaaggtcgtcagcgtctcacttgaataccagtcgtgcgaccgcaaactcgccttgtctgatatccgattgagcacgggttggtaactgagaccatccggttgcaacctggcggcgttcatgtacaaccccttggtcaagcattgcatgacccgactcgaatcctcgcctgccgacacctcgtggtcgtgtccggtcgccttgacgagttgctgcaattgtgtgcggagcaacctggcttcgttcaagaccctgaaactgagagagtgctcattgcaccaatccgtcacggccttgcgaacgggcttgtcacccgccgcggcctgcggattatccttgcgtgcctggtcgagcacctcgtgaaacgctcgaaggacgttcatcccggtcatgtgatcgccatcccgatgaacaaacgctcgtcttgtcttgtcggcctgttcacgcgtcgagtacgactcgaggatcgggttgcccgcctcacggagggcgataatatcgacaatctcccgcgtacaacccaggtcgaacgaagcgatcaggactttggcgaggagcgggttgacggggaaatggagcatttgtcgaccgacaggagtgatggtaaatgctgcgcccgcgggaatggcctcgagttgcatcaactggcggagcgattggacgactgtcgcagagcgatacaggtcagaggcggggaagaacgcacttggccgacagccaactcacgactgaatcgttccggttgatcgagatagtcgaattggagcgggttttgaccccaggccatgagctgtaacaaggctgacgccaggtcggcacgctgaatctcgggactcgtttcttgtgcccgggtgtcaaaatcgaggcgggtgtagagacggtaacaaacgccagcggcctgagacgccatgggtggtcagttgcgaggtcgttcctctgataccgacattgtgctcaccgttcgacccgcacgtccggctcgttgtttcgccgcagctcgactgcaaggcaagctctgtaaagccgagaccgctatcaggtcgcggggaccggcttagcggtggcacgtcccggtgcgaagccctgcgccgactcactgcctcccttgctgagcgggacgacgttcttttccttttgcaaccccgaatccaccacgtagacaatgttggggatggtcaatccggtctcggcgatattggtcgagacgacaatcttgcgcttgtgattcggggtcgggttgaagacttgacgttgtttgacgtcggacaggttgcggtacaacggagcggcgaggatctatcccggtgggtctcgtgtcagcaggcacggtcgttgttgaatcacaaaatcgaactcgcctcgtcgattcccggtgggagttgtttgttgcactgctctaaactcttgacgaggctgtcaatctcttcctggcctgtcaacgtccacgatggtcagccacgtgcgatcgacgcgatgctaacgaccctggactcgctccgctgaaacttaccgggcatgaataccaagatgtctccgagaggcaagtcgaggtggatcttcaaacactgccgaagcgccgcctggaccttgtcatcgcccacatcgtccgtggcgtgatggacgacgacagggtatgttcgtcccttgatgaacaagatcggcgccctgttcgacataaacatcagcatcggcgagtcatgacgaagactggctcctcgctcgctggctcacttgttgaaaaagctggaaaacttttcggcgtcgatcgtcgcgctcatgacgaccaacttgagttccctcatctcgtgaccccggtaccgtctcggatcggcaaggagcacggtctggtcctccgagttgtcggcatcgacgtcgactttggcgctggcgcgggatgcccgggtcaaccgtttccgctcggcttggatgctctttaaactcccgagcaggaaatcggtattcaacgtccgttcgtgagcttcatcgatgatgacgacgtcgtaacggagtaacaaccgggaagcttcgtccggacccgtcgtcagcgacgtcggcgtcggagcgttggcgctggttttcgtcgacgaagacgatgcggtgctaggtggggtgatcaagtccgtggtctcgtcatcgccgcgtttccgtttagacgacgacgacgaggcgtgattggacagttccctgtggtgtgtggcgtacaatacagacagtcagaggttctcgtccgtcgttcatccctacagtcatcaacaacaccaacacgcgattctgcgattcggactgaccttaacaagacaccttcggtacaaaacctcactttcgtcgaccccgccttgcccgaccccgaccctgacctctccttgctctcgaacctgacggcgtacccgacctcatccccgagcctgacacccatctcttcggaaacacgatgagcgagcgagacgcaggggagtcgacggggttgggtgatggcgaccgaggggtgcgtcgccgggtggagtttgagacgggaagccgagggcgtgggcgtgtcgttacgggtaaagtaggcgagggaagatggatgagagtagagaagttgggggatttctaaaatggcgggcgtcaaggggttagccaggtgagagtaggcacaagcaagttgacgatgaccgactcacgggtggatttcccggaacccgtctctgccatgacctggagggtcgaccaatgatgtcagccgggtgagcatcggtgacgaggacgtggaggcgcgagccgtttgcgtgcttacgacgacggtatcattgtccaagatcgattgaaccagcgcatccttggctatgaagcggcacggcacggcacgacacgatcgtcagcccgtgctcattcgcacagcgatgactcggactcaccttcgttgacgggtagcttgtcggcatcttttctcaacctttctgcgactttgaccagcttttccttgtcttgcgagctcaacccgaatccgtttgacgatgatccgagagtgacaccgtttcgacgtttctttgggagaggtatcgtgttgaccatggtcatcgggtcgtcgtcatcctcgcgtcctgcgtcgtcctgtctagctcgttttaatcgtttgaaacgtgccatttccgtcttgtccggtgtgacatgtaattcatcgtctgaaaagtctaccgatggcatgttgtgtgcgtggttgtcgtcgactctgagtactctactactactgtatatccaccaatcctcctatggtagtaacttttgaaagagaagtttagtagttgatcggatttgagcgagagatatggatgacaagtgaaaaatgtcaggttgggtggcatgatagtgtcaggtcaacacttacgtaagccattcatgagtcttcctgacaactaaatccccagctcgaccttttcaacaacaacatgtcatcctcggccagctctactacgtcaccgacaacgacaacgacaagcaatcatcatcatatcacacacaaccatcacaccgtacaaccaccatcacatccataatctcattcgcatcgccatcatcacaaccccgaccaacacccacgatcaacacgacgacgacatcaacaccatgaaggtctactccatctcgctactctccatcaactcggccacaccggccacgtcgaccctgctatgccaggtgaacgacttgtccagctttagcttttatcaacggggaagcgtaggcgagtttatggggttctttacaaaggttagtcgggggcctctcttctctctctctctctctctcctctccttctcctctttctctttctcttcctctcgtccgcttcttgtgccccacctctctatttctctctttctctccgcctcttcttgttctctcctttcctgcgtatcgcctactcacctacttgcctctcttcttccacccgtcttgcctctattcttccacccaccttgctctcctctccccgtcactcgcctcttatcaacaccgcgatcgtcgtcgcctccgacgatcgcctcgccaccctgaactcggacctgtgcccgcaccgacccttagaccgtcgccgagaggacggccccgaacaccccttcgtcgatcgaggaaaacagctacaaggcacacgtctttcgtacccccgccgtaccgggaaagaccggcctcgcatgcgtcatgatcaccgacctcgagtacccgtatcgaccggcgttcacgctcatcaccaagatcctcgacgaacaggccggtctacccagtcagttaccgactccgggatcaggtgcaggtgctgcttccaaccccagcatggcagccagcggagggttggctcccgctcaaaaggggaaattggaagccaccctccaaggttacctgacaaagtatcaagatccgagtcaagccgataccatcatgaaggtccagaaagagttggacgagaccaagatcgtactccacaagacgatcgagagcgtactcgaacggggagaaaagatcgacaacctcgtagagaggtcaaacgcgttgagcaatcagagcaagatgttttacaggaccgcgaaaaaggtgggcacccccgacgagcgcggcgacgagcgacccggggctaacgatgatcgtggcaatagcaaaattcgtgttgcgtggtcatgtgaggtgagggtcggaccgtgtcgacctggccctcagctcggcttggcttgtgcctccctttcggatcgggtcgttgtactcgaatctcgatctctttgcccgtcgtctcttgttcgttcgctcaccggtgtatatccgcccgagatcgtccgttttgatgtggagcgagcgtgtgctataatatataatcgattcgtgccgcggtggaacacgcagtacgtgcgaggatcgaatcggataccgacaagttggctttgcggcgatgtggtgtcgaacgagatacctctaatgaatctctgtgcctacgatcgtcatcgagtagcgtactctggcgacacacgatcgcgagacgaccctctcgtgttgcaagctgttgttgtctcgttttcgaggtcgtcgcccacggaaccttttttcaagaaaaggcaaaagccaagggagcatatttgaccaaacgattatgattgccaaagactttgtggctgtcgagcatcaactatcgtctcgcaggaagagtcacgcgtcgacgaggtcgtattctgtataacagagagaacatgtcaagtaatacaggtacccgttagccgaccatcaacgcggaaaccggaatacccacagtagaatctacctcaaccgacgagcaaaccggtcgcacctccccattcagcccgtcgccaacccgtcgatcatggacatgttcttcccattcccattgcctctgacgccaaaacagtggttctacattgtcggcacgcagtgtctcgtcgcaggggtcatcgacggtggagccaactttggaatcgcctacgcgatgtacggacagcaggaacaggtcaagatgtgggtgttttcgcaagtgagccgagcccgccccccagaggtctgcgttcgacggtgtgacagctgataccattcgaccaagtagaatacgatagccggaggtgaaatcttgtgacggtcgcggtggggatcggggcatgacagtgaactgacacttctgctcttcctagatctcggagtgactcccatcatccagacggcagtctcagtgagtcgcgctccatggttctgctccgacttgctcgttctcatcgtttcaacatcacagatgatcatcacttccacactcgtccacaccgacctccatcactcgatgatcaaaccgctcgcattcgtctggcctcacgtggagcaccttccgaacccccaccaccttttcaagaaaagagccagtccccgcgcagacgtcgagcacaagtcgagcgacctggaaacgtcgtccctcgagcccagaagcacgatcgggtattactggacgatgctgatgaggttcatctttgagggcacggaaaacaacatgctcttcgaccgcggcaccaaggggttccccaaaagactcgcatggacggcgttgcaaggcgtaggactcgggatcgtcgtcggattccccgtgtggtgcttgttcatcgtcgtcctcgggcccatctaccggatggataatatgggcaatcgatgggatccacaggcgagttccgggttggaatcacacgagtgcgcaccacggctgaccaccttgcgacctgacagatcatcaagggagtctacgggttcttgctgggaatactgaccaacccgatcatcgccatgctcgcactcgggtcacaagccgagcaaaacctgctcgtccagcgcgtggccgaggcggcagaatcgacagggtcggatgaggaacttcaagaccagcaatcaccaccaccgccgacgagtcctcgagtggagacgccacgaatctctcgtctacgtagccagtcgcacgccagttccatcgggttgaccgccaacgtcaacgagatctccttgggcccgcctctcacgccgacggtggatcgtgccgcactcccgcaaactcctggcagcgtgatgcctcgtcgtccgagggcgttgacaggagcttccgagactggctcgtattattcactcgggggtacgggaggacgagctcagagagggcgtcgaccgagcgtcgcctcggtgcaacagttgggcgtaccgccgactccaacgctcggcactagacagaggaccatgaccgaatcgaccgtcagtccggctcgaccgatacctccagcgtggatgcaggacgtcggtcccgcgagtcctcaccgccagcacaccggcctgtcccgattgatggcagaaagcaagctggatgtaccaagagagagtatcgagatcagggccgagcgtgcgcaggttcaaggcgacgacgacggcgacgtatttggtcacgccacgtctcgtgacaagtgaatgtgattgatcgtgcgatttttataattgacccagaacctcccgacggtagatgagatatgatttcgatatttcgatatgaatccaatttaattatgacaacatggtcgagattatgacaaaatggtcagagacaacgtcaacgacgttgctaattgtcctttgtttgtgtacgggctgccgtctagtaagccgactcgtccaactcgatctgtccacgaatggctccggccgggtaggtggtggtgtggacgtcggcaaagaaaccgggagggttggcctcgatttgagcgagagtgaaaccggtcgcagtgtcggctgtatcgcgagcagtgtcagagaaggtgtcgccatcagggcacgaccggacctggaactcacatccgttaactacgacaccggtcaagaaaggtccctggagacaaccgaacgaggtccttcgaccttgctcgtccaggggagagtcgatggtggggttagggaaagcgatcctgggaggaccagctcgaccgaaagcggcttggtgctgcgcacagagcggtcaagagcgggttcagcgagtgcggcgggttgtacctcgatgatcctggactcacgatgtgggtagccgtgttagcagggctttggtagtctccagagatgtagaccgagatgttctacgagggcggcgatcgtggtgaggcgagaactttatcacatgccgggttgaacgacgactcacgtagcaaatcaactcttcgtacgagttgataccaaacttgtaaactccgtaggcgccaggttcaccagggacggcgacctgcgagttgttgatactggcgtcgaaatcaaaggtcagcttgggcggtgctgagtgtcgatgccgacccggctatactcacacctgatcaggtccagcgtaagcagtgtaggtcgaggtaaagtgaaacactcccttgacaaggtcgtcgcccttcttgccatcgggcttcatcatgtcgtcgtggtgatcatcgtgcttttcctccttgccccagttctctcgcttgttcgagggagcggccatggcaagggcgggcaaggccaaaagggcgagggcagagacgcgcatagtaaatgggatgaagatgtagaggttgtaaaggttgtaaggttgaaattcggtttggtttgaatcgagtcggtcaaaaggccgcctctctatcgtccgaccgactaccccgagttccaccttatatgctcttttcctacatgacctccgtccccatggatgatcaagcagagtcgtccaagtcgttgccaaggttagacccaagctttccatttgacccgtttgggatcgagctcagaggtcgtcggccttcggtcttggcggacaggcgctggcccatccatgtcgaccacagcccggcgctggcgtcccgatcgatattcatcccagagtagttagagtgttcagccttgcgtgggcatatcacttcgggtcgactgggcaagtgactttgtgtgcgatcgacgacaggcaagggcttggcaaaccgactctgcctgtgacgggagacatccgcggaagtattcgaaggggagtgtcgggccgaaagccagggttgggcttggtgtcagggcgttcaggccgtcatgaggggccgtcctgttcggcctttgtagaggggacttgcacagcgagacccacgtcagatcgcagctcacagtccagtcaggccgtcgtggctgatcggaaaatactttgcatgtcatgccatggaccgtcgatacactctacaacgagagaggtggttgctgccgctgacgcgcgcgcctcagtgaagccagcggtcgaccacgtacccggtcgtgtaagcgtagacggccttgtggaagacgtcgatgatctgttcgctccgaggccaggtcctgcagacacatacacaccagcggttagtcgcggcgagtccgggaggagcaaaggtactcaccaagggggagcgctcacctgggcataattctccaacgtctgatccgtcaacagcctgatcccggtaaacatgaaatcggccacgaatccaaagatcccataggccgacatgacgcctcggattccaccgaccaccattccttgaccccagtgcatggcgtgttgcaaaccgagacgtcgagagtcgggtcggtagggtagaccgaggagcttttcgagggtgtgtcccgggacgtacgagttgggtcggcccgtaaaggcttgctcgatcttttgactaaaggtcatgctgtggtaggtcgggcgtcagggtccgtggtgccaggaaagacgaccgacactcctcgactcacgccccgacgccgataatcccggcagcacatccgtacaggaaggcagtccctagggattgcttggagagcaagttgggcgtgggctcggtgttgtcatagtatggattcttggacatgttgacggatgagttgcaagatgattcaatgcgtagcgtcgtctagcttgtttccgagagctgatcacggttggtgaccgtttatacaaacacacagccccatctgcaactcggattatgtcagccggtccaaccgtcaaaggagatgcaagtgtcggatttgatgacgatatcggctggcgtcgtcatgacgttcacgtcagcgagtgagactcttgatcttgttaatgatggtcggtgtagcagcattcaactcgacatgcacgatctggtcgggccatagcggtcttcgaaacggaccagccgaccgcgtcgagtgatgggggctgcattccaggattcgacgtcgttcgcatcagcggggctcattgattgcccggagacagtattagagcgtcccgaggctttgaagtagacaagaagacaagacctggactttccgtatagatacattcttttcgtagtccgcttccagtctcgatttcacaggcaactatgcgagcccaaggtttggatggcctcgatggcttgtattgacgtcaatagggcaatggtccgtgcaaatatcgaggatacatcgtgatctcgtgatcagctcctttttttttgcggctcgactcggctacggaaacagggcccaatcgatatgacaacgaacaaggttttgaggaaagagtcctttgacaaatggatcgaccgtgcggaagaaggcgaccaagagtttcagctttgtcgttgttccatctcaagtttactcgcgaacaacgacaagcgacagaaccttctttccccaaatcgtcatcgttatatcgtctcctcctcgggcccggccccttttcccgttctcggtgagacgatcggcgttcggcgaggtcccacacgcgacaaatctcgtagcctagcgtggtcggtctaattcgaattcgaatattcgattttgaattctatgtttctggatcagaatgacatcatcgacgatgtctcgaactcgcattcttgtttgttcaaaccgacgactcgaaggcgcaaggtgaagcggctccgaggcgagacggtatgttctaggagtgcgacatcatggctgcgattccaagtctcgctcgccccgcctgcgtggtcgatgtcgttcgtgggctgacgaatatcgagcggcgagtgggttattttccgcagcgttcctcgtttcccgggcttgcgtcgtcgtcatagcacgtaaagctgccatggcgggctcggtcggcgactccacgaccgtgaccgattcagatcctttgaccgcggatcgttcatatgcaaacgacctcgaggacgtcttctgagcctgtgatcagggggtcctgatcgtttcacaagcaaaataggcgaactatatcgaactatattcctttccagcacagcaacacgagtagcgagcccgtgagcccctttgatcgacctcgaagccccgcgcctttcccccgacggatctccgaagccaaagatccttggatcgtccgaccattatttaacatgtcgatcgaactcggcgcacccacactgggtggcacggctgatggacaacatcacgacttgcctcccgtgacttcttataccaccatctctgccggtcagcccgtcaccgccgaagccgccacgtacaacgctcagccggttgtccatcaacaacccgtcgttcaacagcaaccccccgtcgtccagcaacaacccgtcattgttcaggcggtacctgtcgaagagatggcgaggaccaaccgtgaatccgtccggttcgatgaccacagcaacacgcacgattcgtccaatctccgtgtagccgaggctcgacgtgatcgatcaggatccacggcgacgacgaggtcgaccgcgagtaccgtaggcacaggatcattggctaccactgccagtgctgaaggagacgattgtgtcaaggacaagcgggtcaaggaatggaacaagcatttcgacgtggagcagggagagagcgtcatctgtagtgagtctcggcgtgtcgcgcgcggattcaggcgtgtagtctaatgatctcgtcgttgtcgtcgttgttgaatagcccacggctgcgctttggtcgtctcgggtgtcatgattcatggtcggatctacatgactgaaaagaacatttatttccgtgccaacattgtcgggatcgttaccaaggtgggtcgctcgtcaagttgatcgccacgaatgtcgaccaccggctgacccgcaacgacccgcagcgacaaatccccatctcgagcatcacctcgatctctcccaagaacgtcgctggatccatccccaatgccattgaaatcctgcacgaaccactcgcccccggtcgcaactcgtccatcaagtcgagtagcaacgacggagacacgcagaggtcgctattcaccaccttgcccaagcgtgatcacacgatgggacggctggtcgatgcctggaggaggcaagcgcccgaggcgtacgagcgggccatctcgggtggtggagaaggtggagagttggccaagtacggcgatggtcagagggccgcggcagacgatcgaggttacgagtcttcctcgtcgtccgagtccaactcgacggtcggtaggaacggctcgggttccaagtctggcgttgagcagcgtggcggtggtgcgaccggtggtgacgggtcatccaagggacctcacgcggccaccaaggccgatacgcccgatctcgaaaagcaagccctgcacacccgcctacccagtgagcccaaaaaggtctacgagctgctgtaccacaaagagtcgttcttgaagggtatctgggaggatgaggggatgcacagtgagtcgcgacgtgaatccgacccgagtagacgcgtgttgaccgacggcattcccgcgcagatattcaaatccaaccttggaccaatggcaagcggacgtttacctatagtcgaccgctcggcggcaagatcgggagtaccaagtgtgagagcgaggaaaccatcattcagcccgacggatgcgaggattggtggggggtcgaaggaacaacgaggacgccgggtgttcccgcaggcaagaggtgcgggtcgacaaggggtgtgaaacgaggtcccgcgctgacccattcaaatcatctcgcagtttcttgacccgaagcaagaccgtgtttacctatgccgagggaggtggcacgctcatgcacgtgacgtatcaggtcgagtggagcggcaagagtatgctcaagagtaggtcggcctggggtacctccagcccacggccactaagctgacatgatgacgttggcaggcaccatcaacgggcaagccgaaacgggacaacaaaagtggaacgatttattggccaaaaacttgcgcaaatacatcaaggagcatccagacgagtttccctcgagcggcaacgacgaggacgtcgatggtgagtcgccagtgggccgagtcgtgacgcgaagctgacgatctgaatgcccggttcagaacccgcggaagcggcctctgctgctggcaagacggacgaaatcggcacaccgtcgaccacgaccggaggtgacggttccaacagccgcacgtcgacgtcgacctccaaggtcaacgcgagcgacggcgaattcgaccccatcggctgggtcatggaggatcctcttcgtgccgccatctcggccgttctcgtcaccatcatcatgctctacatgtggtcactcgtcaaggggttgtttgggcgatccatggtgcagatcagcaagaaacggttggcccagctcgagcactttgaggccatgtttctcaagcacggtcatccctcagccgccgcagctcaggtccatcccgatggcgtggcgggggcacgagtagctaccgagacggtcatcaagaaggtcgtccgaccgaggtagattccggcgtcgaccgattgtaacataatccatcgtttcgtgtattaggtcatggtccgcaaaaggtcatttggaatgtcaacgtcgagccgtggtcaacggggatgtgacgatgatgatgaccggggagggctcgataagtttgtttgactcaccgcgggcccaggtataggatggccactaggattgagagagcatacattgtcatttctatgatgtagtcgctgttgtagttggaccgagtgcattttcacgtgacgcgactcttgacggcttctcgggacctcggtcaatgtcggctaatccctcgtaaccccggggcgggcccgttcaagaccgtcaatcggggacgcttcctcttgatgctcatcatgatcattgagctgcttcgtacttggtgactagtcactccggtcaggtaaacagtagccggtatgccaatgtcaacttcgaacccggcggccggacctagcgcagtcgtcgagcctatatgaatcaactcggtagctcggtgtcggaatccatcacgaccacaatgttccccagattgcaaaatttcacgacaacatgtcgcaactcatcccacaaccacctccgagcttgttccttggcaaccttcgggatatcgaccctcaagatgctattggatcgatcacccagtcgatccgtcgatacggtgagatcgtcaaactgcaagtcccgaacgggcccaagaatgggagattgttcatcggcagccaacgactcgtccacgaggtcgccgatcaggggagatttgaaaaaatcgtcactggggctcttcaagaggtcaggagcgtggccggtgatggcaagtcgagggtggcagcagcagcagcgattgacctccgcgtgctgatcgacgacgacgtgcaggccttttcacggcgtataacgaggaggattcgtggtatatatggagacgaccgtgaaccgccatggaacgcaggactcatacgtcgtcccacctttcaggaccattgcacatcgtatcctcatcccggcatttggaccgttgagtatccgcaacatgtttccagggatggtcgacatcgctacccagctcgtcgaaaaggtgagacccttcatggaaccgatcgatcgtggctcgtactgatggcagacctcgtagtggagtcgattcggcaatgccaagattgatgtcacggccgactttacaaagttgactttggacagtacgtgcgacgttgctacccagataaactctctccgctgacgcacgtgtgccctgatagccatcgccctgtgcaccttttctcaccgcttcaattcgtgagtatccaaagtcgtggctagcatgacgcagctggttgaccccggtggtcgtcgccgtagcttttataccgaagccgaacctcctttcgtccatgccatggcatcgtcgctccgtgaagctggagttcggaatagacgaatccctggcacaggatggatgtacaccaaggcgaaccagcagtacaaggatgatattgtcttgcagcaccggatcgctgacgaggcaagtcgggcgcgatggattagcgtgacgaggtctcgactgacctggactgtatgcgctacagttgattaccgaacggatcgccgaaaaggacactgcaccggatgatctcctgacgaccatgttgaacggcaaggatcccaagacgggtgggtgccgagatcgtcacctgcaaagtcacaaactcacctcgaacgtcgcccaggtcaaggcttgagtccggaaaacattcgataccagctcgtcacctttttgattgccgggcacgaggcgagtccgcttggcatcgtatcggcgacgaccaggaacgaccagtctgaccgcgatcatgtgttgacagacgacctcgggaatgctctcgtttctctttcactacctcttgaagacacctcgggcgtatcaggcgatccgtgaagaagtcgaccgggtctgtggcgacgaatcggttcgatacgagcatttgcaacagttcaagtacatcgatgcctcccttaaggaaacgttgcgactcaagagcacagcaccggcctggaccgtagcggccaagacggacgaggtgatcggcgggtgctaccacgtcgacaagggtcaacccatcgtcatcgtcctggacgccttgcaccgggatcccaaggtgtggggagatgatgtcgaagactttcgaccggaacgcatgctcaatggacagtttgaagccttgcctgcggattcctggaagcctttcggcgagtgttggcgtgagacgactagctggagttccgagctgatcttgacggtcttgttcgtaggcaacgggatgcgcggttgtattgggcgaccttttgcttggcaggaatcgctattggtcgtcgcaacggtgcgtcctcagccgtgacagaatgtcgttttcgtcgaccgactcgaggttgtttgtcaatagctgtttcaacactttgatatgcggccggatgatcagtcatatcagctagccgtgcgtaccgggcgtcaaaacgagcggcccgattctgaccgtcagctgaatgccctctttccgaccgctccagatcaagacgtcgttgaccatcaagcccaacgggttctatatgcacgtcaagaagcgcaaggatgggctggtgaccagcagcatcggtctcaaatcggctcgtgccgtgcgtgacggctccgatgatgatgacgcagcgactgccaagaacggtggcactggacccaaactggcgatctattatggcgagtgatggagatgcgtcagagaccctcgacacaaagcccggctgaacacgctgatgcccgcaggaagcaatgccggtacttgtaaagcccttgcctacaaactcaaggctgaggctggacgtcgcgggatgaacgtccacgttgaccatctcaactcgatcggacccggtgatttgcctcgggatcgtgccgtggcgatcatcacggccagttacgaaggacaaccgacggacgacgccagtttctttgcggaatgggtcaagaacgccagggtcgggacgcagaagggcgtcaagtacggcgtattcggatgtggtcacccggattgggcgtcgacgtttcatgccatccccaagctgatcgacgagcgtctcgaagagtgtggcgctgagaggatcgtcgagcggggtcaaggcaacgccgctgcggcagagctgtttgatcagtttgacgagtggaaagcgggtttccttcgagagaccggtggggatgctcaaggcgatgtagacgagccccacctcgaagccgagatcgacagcgagattcgcaagaacatgctccagcacgattcgctaaagtcttgcaaggtcatctcgaacgaggtcgtaagcaagggcgccgtcgatatcaagcgcaagctcgtgctggaacttccagacggtgtcgagtatcgagccggggattatatcggtctgctaccatcgaacccgatccccgttgtccagcgagtattggcgaggttcaaattgcacgccgacgacgtcgtcaccttgcgcggtacagccggctcctggacattgccgttgaacatgccaatcagcgcgtttgaccttttggccgggtttgtcgaactcgaatcgcccgtgtcgctgaagcaggtggagcgactggagcgatacgctcgcaagggaagcgacgatgccgcccggatcgaccgctactgtcacccagacgtgtataagcaagaggtcgctgacaagcgtgtcgacctgctctcgctcgtcgaagagctcacctcgttggatatgccgtttaccgactttttgatcgccatgccgtcgatcaagatgagacaggcgagtgcacgcctttcgtcgctcaagtcttggcactgaattccattcacctcttcagtactcgatctcttcgtcaccgttggatgaaccgactcgagcgaccctgaccattgccgtcatcgatgcgcctcacatttctggacgaggcatgcgatactacggcacggcgacgcattttttatccacgttgatcccgggcagtcgccttcgagccggcgtcaaaccatccgcagaacagtttcatcctcccaccgatcccgtcgtcgatatcctgatggccgcgtcgggttcaggaatcgcgccgttccgtgggttcgtccaggagcgggcgttgcaaaagtgagtccgagttcttaggggttaggggttaggggatgctgaatttacttccgagttccgtattacctcatccgggaggagagttggtttcggaagcaaattcatcgactcacagcctccagagggtcagcaacgacgagtatgatcatggtgatggtcaagatggtggtgttggtcgaggctacgacctgcaaatcgggctttcatgcatacaatctagtcaggagaagaaccgcctggaatcatgaacttttcaccgtgtgagccctcgagccgatgatcgctcccggtcgacctcgcagactgacccgtagctggacatacagatcaaccacctccagacgctcagcgcgaacaatccctcctctccccctccaacacgggattggggtcgggcaagggtaaagcccgggtcgggggttcttcgaatggggggaaacaaaagcggccttggttctcgaggtgagttgggcggagcgtatcgttgagtgggttacggggatgtcggttgctaatccctcctccgttcctctcttcgctcgattacgctctcgtccgaactgatcttattacccggaaaactcacccgacctctactggatcctctcgactcgaccgtgcgatcttgacccgcgacaactcgatagggacgcatcatctttccaaggatcataccaatccggcggaggcgagtcctcagcccatgtttcccctcttcgaccgccccttgagctgagctgacccccacaccaacaccgacactcggaactcctcttaatagaccctagccgatcgtacaccgacgcctacgcatacgacccttcctccctagacccccactcggtctcttcctccaataaccccaattacaacccatcgggctcgatgccctccaccagcggacccggcgcgggacccgggggtactcatgggaatcccaacaacgtgtgggaggcgagtatcgggttcttgagggtggacgtcttggcggggttgggttacctcggtgggcccgtggcgggtgagtggttcggttcggggtcgggatctctccttttcccggttcgttgcggctggacatgtcacgcgggggaatctgtagggacgagagggagacactgagggagaaggagcttgctctcaagatggatatgggggatgatttatcatcgcaccacgggcaatcggtggttctgtccaaatcgtcaacggttgctgtcggccggaccggtggagcatcggctttcctccaggacgaacccggaggatcatctcgtatccctacagtcttgcctgttctcatcgcgagacattgtttcacatccacgttcgacctgctgacacggcccttgttctgtgacaaccttgccagctctgttgctgctcatctttgagacgaccaacgactatgtccgatttcatggcgagtcgctcgtacatattcgcttcgttccggacgccctggctgacactgtctcctctacagcctaccaatcgggtctactgacgaccccgatcatcttgctctggttggtcatgaccctcatcggcttctggagatggttacggtgagtccttccttcacgcatctcgctcacgcacgtcatcttattccgataccgctctgcgtctccacactcgcagccggctctacttgctcgtctcctttatcgtcgtcctgtatacggcgttccgcgcgttcagggatccgacatcgtccgcgcaaccggccgggatggggttgagcaccggctatctacccaggttctatctgcccatcatcggggacctcgccgagaggtgggtcggggaagagtagcgagattacaagggcgaggcagatgaacatggacgagatcgacgtcgagatcctgcatgaggtagggtgggagatgtcctttgtagtttcaggtataccagagtagatgatgatacattccgaagatggattgacgtgtgcgacagcgctgcttttaacggcgatactgacgcgggaacgacgtgtggccttgatcccggagggatatggctacatgctgttttacagacgatgaaagccagcgactggagcccaggcgaggactaggaacaaagcgaagctgttatggcaatgagcctgttgaagaaatagacctcggtgtaagacatgtagccatacgcggaggttctcatctccagtacttacgaggcgaaaatcgcatacccaaacaacccaacctcgcggatatacttggctgatgcagagttcaaatcccaatgaagccgccaagcgtttgcgccgcacacaatccacacaggacggaaaagtgaaagaagacgtgtatcggcgagagaatcctttgtgtaggtgtccgcgcgcgagctttctttcaacgttcgagtacaagctttcactgggtctgaactaccaatgtattggcaaatattactcaccaccggattggtatgcgacggtatatatacagtgcaagaatataccttattgcagataccgcaagggattatagcttggaagccctgcttcggggtcttaggttccagctgctccatgatgccaagcggctgtcggagggtcgctaggaactgcggttgagaagaagtcttcgacgtcgagtctcgcgcctagcatacattcgcagaatccctcgcccggcgttctaggggcaaacacaagacggcacacaaaaacaaggcaatcacgcggaatctggccacaacgcgccaaaaaacaaataccacagctgggaatcgaacccagtgctattccttgggaaggaataatgttaccactacaccactgaggtcttcaagatttcccttttctaaagatcctacatatgaatcatctgacacagggtgaatcctgaccgatatcggtcagccagtgctgtatgtccgacctttcaaccctgcaatcgcaacagactcttcttccaaggatagccagtaacaatctaataccaaagtcgatttcctgccatacctgcacgggacgacagcgaggctgacgctgagctttgatgcggagaggtcaagagcaatgtggagggtatgaatgagggaggtcgccttcccaagaatcatgaccccaagaggcctgaagtttcgactgggtgttagtggtaacgctgaatgtggatacgcattcttgcattaccattgagtgagatggaggttttggcgtcgtcgagtgtgagcttccaataaggaccagcctgaatcgcaagctgcaccgactgtgcccacgcgagctcttgcttcctctccctctttccctatgcagccgatgggtgtactcctaaataatcgcttccgtatgaaagcggtctgtaccgagttaacgcagctcgtcaaaacgtatgatgaacatgacatcgcagtcgtcgacatccgataatgagaatgtcagggtcacacgacagaaagattattgagcaggacgtctcccgtcgtccacacgatccgactcgtctgcttattctcagcgaaaacataatgtacggtacgtggtccatgatgaataattgatctgtccaccgagtgttaaccacactggatgataagactatacggaaaccgagaaacagtcgagacgagcagtccaagaggcagcgaaaatggaaaccgaggcatgatcatttacaggaacgaccgggatcatgccttgggggggacctcgttggctataaattggaatcaggatcagcacccaaagacaagtcgaatcagcgctcctcgctcttgagctgggccggggaaaagagccgacgcttaccgttaagtacgcccttcctcaccaacccctcgggtgcctctcggccctgcaagaacccatccaacttgtccttcttctgcgccgtctccaaatcgtgcttctttccggccaaagcgtcaccaggctgtccgagcaggatgttcttgtcctgcaattccctggggtcgggtcgacttccgatgtgagactcgaggtcggccgtcgcgctggaagggtgggaaggtttcaaatcgtgagacctatcgattgaaccggacccgagggtgtatcctccggtggagttaccagcggggatgacgttgggtgccagttgatgggcggccgcttgggcctgttggaaccccttttgagcggcggctcccgtggtctgcgcggcgtccctgaggacgggtccggctcgctcagcagcggtagtggcggccgaggtgatggtgttgctagcctgctggacggtagggtgggcagcgatcgtgttgatcgtctgcgaggccgtgttgacggcctggttggcaagggatttggcttgatcgaggaaggctactcgacagggaaagaaaggtcagccggtcgggtcgagcggaggactggcgtggagagctgaaacttacacatggtgactagattaaggactgcaggatggtattggacttgagagattctcggttcaattcgagatgctttacaagagcaagaggtgtgtagtttgatatgcatatcattgccgtgacgcgataggtcgatcactcgttgacgtcatgaaaagagagacaagttggtcaccacagggataagtagaatgcaccgcggatgacagagttcaaacgtgtacaatatcacctttcttgatgtacagctacaaattcccgacctcggatggattcaatctgacctcaaatacgcctctcagctggctcaagagtgcgctgacctgcctaccggtctatctcgatctcatcgatgagaaatcacgctcgtcgacagtcgatatcgtcggttttctaaacatccgatattcgatgaaaatgcttccgaccatcacctccgccctctccgctttcggttcaagttgaccaacccagcagggccatcgacattcttgctcattcacaaacgtaatcccagtcagcatgtcgttcttcgtagccacagcccaccttccccagtcgacctgtccgggcaaaccgttacatgcggtcgaacggagggaatgttaacccctatcgcgtgacatcacacgtccgcccgaattaccccgcggagcgcctatcgagggtgaaacccgtaaaaaagttccccctgctgtccaccttctaaacctttgagttttccgcagagggggtccaccggattacataaccatcggaagtacgaagcgcgcactagacgtatacacacaagctcatcaaaggatcttatacgcccagagctccatcattgctgaactggtgatcatgttgtctgtgtgaggcggggaagtgcgggggggtacaactgtacaaccacaccttggttcccggcaataaattgtatgttcaagaatgcagcccctctgaagaatcacacggggtatacgatccgatgtacgtgggtctgaaagatgatcttttgggatagctaccggtccactcgtcgtacacccggagctcgtttaaacgaggatcacgctgcgtcgacatgtgtttcggctacgactgatgtcgtgcaggagcgcgtcgttccccaggcaggcgcagatgaacgaatttggacccccaagctcgcgccggaccagattttatgagcaccttaaccaacgcagagtaactgatactcacgttcacaatgatattgaaccagacgcgctcgaatcgcttgtcgtcgtcacaagtaggggtccagccgagctcgagatcggacctcgattgagcgcgcgtcactcgtcaagcggtacaagagcggctcgcactcgtttcgttgtaccgtgttcctatcccctgaataagtatgatccgaaccgtgtaagtagtagaaacccacacacagtagcgatgatattttctaacaacgaattgatcgaaatgtgctgcatgtagcggcgacttgtttcaattgccgaggttcacgctgcgcgcggccgagccgagggggacagaggttcggttcgtcagctttttgggaatcctcgtcgttatcgatcgcggaggatttccatctcgattgcagggccaatgagagctcgaactttggcacgacttggagtgcaaaagttgagagtaccaagtcacgtcttccatttcatgttgcacgtggtatgtgtacggctcgtcgagacggagcaggtggtaatggtatctagcaacgtacggtacttgtcgtagaggttcccaatttcgatttgctcccgcgattttcactttccgatcaagctagcgacgtatttccctaggccaacaacgacgatagtggtctcgtttggccaaacgacattctttcgacctacgtcgtctgctccatcttgcgcctgccatcgtcctggtaacaagctcctgtcggaacgataagactactgccctttgaacgatcacgctagtcatcgaaatcaatcgtccgcgtttcctcaccaacccccctcaaattcttagccgggcacaccgaacgcgaaaatcggaaatcgagagaagatcgacctcgttcgccttctaccacccgaacattctcgaccccacagaccacagacctacctgtcatacatctccatctacatccatacttcaatagatcctcgggactgtgaatagtctcgttagaaggaaccccaagcagcctttaaatcccacccggaccgaggaaaggaaatagagagggaaaaaaatgtcgcacaactctgaggtagacatcgactacgagtcgttgcccatcggtgccggtaagttacatcttcatcgttctactgtctttatttctgtctggtggtctacgtgctcgccttctctgggacctggacctggatctggatatgaaccgggtttcggggctgagaagggataaggcggaaattcgagggagtggctagatatcgagccgaaacgacatgctcgtcaagaatctcgaacaaggcaatccatatctacatcaattggatcggtcaccagaggtaccattgcgtatcgttgatcttctgccgccgacctggactcgaacctggaaaagaggtcgaaacctctaaaagcaaaccctcctcgagcgactccacacctacctttctcatcctcccgtggcccgcaatcgaaccccatctccgagatctgcgacgaagaacatccccaacccggatctccctatcgatgcttgccacaccgaatacacaggccgggccgttggcatcgtcggatcgaacctattctttggaagaccccgccttcctcccatcgatcgtgtcatggacggacatctagggaatatcgatcatacgaatctggctatcatggtcgttctcgtccagcgggcacgccggggaacgaatgagaaaaagaaaacgcccatcgaggctcgccttcccggcggattcgtggttcagcggggagatgactatcatcagcgccgaaaaaagccgcgtatggcttcttttccgcggggggggggaagccgctgaggagatccagatcggggcgaggaagctttgtggtcgagccgagatctgcacaagggtggagcgtgatgcgatatcgtcgaggacgtgtcgagagtccgattggggttcctaccgagaaccgttgtcgacattagatttgaaggctggaatatcgctggttccagcgcggggtctttacggcgcccttctgaaaatttggtgggatggcacgctgacatggatgattttcgtgtaggctggggtactcacatgctcgccggtgctttggccggaatctcggaacacaccgtcatctaccccgtggacgctatcaaggtgagtgacggcggcaagggtgttaccatgagcgtcgcagctgattctcaatcctgtctgcagacccgaatgcaggtcctcccctcgctatccccctcggccctgctcgctcaaggaacgggtgccaattcctcgaccctgaccgcctcatcctctctcatgtcccaccttcgtcacgcatccaccactcaatcgctccgaacgctttggcgaggagtcgccagtgtgatcatgggtgccggacccgctcacgctatgcactttggaacgtacgagtttgtcaaggaggtcgctggaggtgatcgagaggggatccgaggtgtcgggggtaccgcactcgccggtgccatggccaccacggccagtgacgcctttatgaacccgttcgatggtgggtcgccccgcttgtccgtctgcacatcgaattaccgtacgagctgaccagtctcctctcgtctctcgcgtctgcagtcatcaaacaacgtatgcaactccaaaactcgacttaccgctcggtcatcgcctgtgccaagcacgtgcacgcgaccgaaggtctccgagcgttctacatttcctacccgacgaccctcttgatgaatattcccttgcaagccgtccagttctcggtatacgagatcttgaagtcgttcttgaaccccactggagagtactcgccttcgacccatatcgccgctggaggtgtggcgggaggtgtagcggccgcattgaccaccccattggacgtcgccaaggtaagtgatggcagtcgctctcattcgattcaatcccgctgacatgcccacctgttttaccaccgcagaccctcttgcagacccgaggaacgtccaacgacgcacggatacgtaacgcaacgggtatggccgaggctctcaagatcatcgtcgccagggacggatggaagggtcttcgacgagggatgagcgccagggtggtcacttttgccccttcaactgcgatcagttgggccagttacgagttcttcagtgagtcgacactggcgtcgtgtggcctcgactcggccatctagtgtatttggctgactgtgtggcccaaacctatttccagaatctctcatcaagtcgcaagactaccagtccaccgccatggcctaaacgccatttaaagagcttgagacgaccgggatgaccgcatggttgccccgcaaaccgaaaacgacttgacgcttctgatacatgtacaactaatgcgacgatgacgagcgatcgaggccagggggatcggcgagggatgctgctacgttgagactagatagactgtgtgattattggcaatggcagaggtgttgtgatgattgcatgatatacctcgatcgatatctgtcttgaaagttttgatgacgtaatgtgacttgttttgaatttcgaggggaacacttgatgatcagaaaaatcagaaaaggggtcttgaactactcgacgacatggttccacatcaggaaggtactactgtcgaacagtccgatcatatccatcggtgccctctgactaggaagcccaagatacggaggtaagttgaagctgcgttgttcattaacgatcgagctcatccgctcggcatatcacgaacgaaccgtaaaacctgatcaaagtcagcgttgacgatacgtaaagagagcagtcgtaaggatactagcagtatgagctcccagaacaacctcgtacgtttcccacagcaagatcaattaagccagaacgcctatacgctgacgaccgaatcgctctactttcagtctgtccccggcggtcagaccgtctctcgcgatcaattaaaggccgaggtggccgagctcaaacaacaagagcaggatctgtacgaccagctggcagccttggaaaaggagaaagccgaggctgctgtgcaattggagcaagtcagaaaagctcgagaagagagaaaggccgaggacatggagaaggaaggggactcgtcgttggtcgctgccgtcttgggatcagttgggaaatcgtgatacaagacgtgggttctgacatctgctctgaaagccgacgcgacctgatcttccaatttctttctttctatcagagtatcactgacgacaaatatagatgaccccgtctagccgagcctttacacccgtgacgaatccaacttcctttccacatttacgaattcacgaacgatctgctacgtgtacaacttgctggtcatcacatcagatcatgacgattattggataggcattttgcgcatgaatgatgagtcacgggtgtcttcgcaataggaacccacggataagagggaaaggaagagctcatccgagcgaacgacatcgaatgctcccgatcccattcgtcagcagtataggttctgagcaacagcatgcagcgccaaggagcgggaaaccgactgcgatcttacacagtcatcgccaaggaaagaggacgacatcatttgaggtagcgatcacatgtttcgtttcgattttcgacataaactagaacccaagaacagacggataggagacgatcccagacatgtttcgtggccgtgacggagacgagagagaaggaagaagcacgttgatcaaagacttgggacggtcaaacaaggctaatctaccattggcagcccaacaaaccagctccttggtccgagcgttccaaggtccgcatggctctggcgtgccatctgcaacttggatcacgtataagtctcagagccaaatatgccttcaatgggttcgagctcacccatctgtaccggctctagctggattagcagtcgtcaaggtgaaatcatcgatcccaccaatggtggtggagtaagcaggcgcgggagatgtgaggaccccctgatcgatgagaccggggctgttgttggtacctttgctgcagaggaaacgtttgagaccaccggaagaaggcgaggtaggcggataattgggatccacggtgtagtcggaacggccaggactcatcacgattcccttttccatctcgtcttcgtgataattggcggaagtcagcgaggcggcgttcgagccacgacgactgcgatcgagaagattgaggccaggtaaagctttcgcgcgctgagatcctccctttttgtggtggggaaagttgggatgatctgtcaggattgtcaagcgatctttgcaaatcagcgtaaggaccgaactcggtagtatgcgattcgagtgcgggcttactgttgttggtgaatggatcgactgcatctggattttcggcctcgtcgagttcggccaagacatcggttggggcggaactgtaaagcttcgccaactgtgtggtaacatccttgctccaggtgtgcgaggtctttccttgcaagatctgggtttgggcgatcgaaaacaagcagtacggggtactaatagtatcaaaagtacgtatgagcaaggacttggtcaccagtgtcaggccaagactcacaagacgaaaggctgtggcggtttgtcactgatctgaggccgaatctctcctcctttcgcgacggaagatcgagaaacgctaggcgtcaatccctgcataggcgagggtagcaccgcctcgaggacgatcatttgggccggagtcgtgctgtcgttgatggacctaagatgatcccaactagataagtattctgcctcggcgccatctcggatgaatggacttacgaaggcgtgtcgaggatctccggagacaatcgggcgatgccatacaggttgggccaagttcgcatcgcttgaccaagagcctataaagaggggggcttccatcagccagacgcctatagcaaatcacagagtcatacagacctctgcggcaatggccaaagccgtttgaaagtccaagagttcttcggcttccgagttttgagtctcgcggtccgagtctcgctgttcttcagcttccgcgcgagcgatggcgttgttggcgttttgcaagacttcgaagagggtcatattggagatttctcgaatccagcctttcatcattgatgacagcggatacgacacttctggaaggcggtaagctgggatctaaggtacgcagagtcagctgtatccatatggtgttcggaaggttggacctcacctggtgacgggcaaagttgtaaacgaggacgtcgactccaccttgacgggaagagctagggcggacgccgtagactgcaagtgcctatgtcaattatcaaatccgctaaaaatcccggtaccacttacgcccgaggtacactcctccggcttgtacgacgggtttacaacctacggcccgaaatccaatcatcaactcctactctgcggtgtcgtttcccaaaagctctcacctcgtttcgcatacgtcttcagcgcgttcaggtagacgtccatctcggacttgcccactccgattcgctcagccaggatgccgctgaagaacttgacgtcggccattcgataacctttgctgagatacttttcgatattatcttgattcgtttcgaccattggtcccgtcgcggactgcggcagttcgactgccgacattcccttgccgtccgcgatttctctaacgacaaagagcatcacacctggaacagatgacgagcctatcaacacacatctccaccttgatgataacgatacaacttgccttcagaattgggaaggttgagagtgatgccatggatcgagctctcgtcgtctcgcgaggtccgcttgcccagcgctagatccttttcgtgttccacctgagcttttctggtgcccgtcgtcaagacgcggtcaaacatggttccaatcttttctagaggcaattcgagctcttctgccaactcgtaagctgcctcgatgaacctcgatcggaactgaaccagctcctcggctttgcctgctttggtctgggctccctttttctttctaccaaggtgagcgtgacgacgagcgatggtgcttcgaattcgcgggatgaatgggttcaagatcttccaattgaaagacaacgaatagagccactggaatgtctgttgtcgaggatcgagctcttccaatacgtcctacaaccggtttgatgttagcgcgcataccatcccaggagcaacatcgtaacccgaacccaccttcaaatcagccagactctcgatgacgtgcattggcaagtgaccatccggcctgaccaacagtcttccttgcttgtcgaatgccgcactcgcaatgacgatcttcctggccttggatctgatgtctcgctctgaaaggtagtcccagacggcgaatccgatagagatcagcacgatcaccccacacatgaccgagacggctgcgcggatcaagagatcgattgttcagcgtaagtgacacacaattaagcgggggatgagagagttgggactcaccgatggtaatcctgacaatctttcttttccctgcaggcaagtccagagggtcggtattcgatctgaccgagaacgaagttccccacagtccaacatagtgcatccctatacacgacgcgtttcactgttatttgactggcgccatatcgacaagccgatcggcttcagtacgactcaccacaaacggcgatggcgagtaccaaagcgcacgcagtcctcttcaagaaattgtcctgccaatgggctcgcagtcggaaaaacgtgaagaacgcgaccgtggtggcgatcatggcgatcaggatggcgaggacgatggtgtatgcctggataagggcatctatgggtcagtatcactgttcggaggtatttcaccgggaaggcggtatagacccgcgtcgggaggcttgccttgtaatccacattgtagagaggttgctggaacgaagcggaatagtgcatcaagccgactaggaatccgcacgtcacacgtatcagcttctcaacaggccttccgatgacctgaaatggacgtgacatactcatcccaccgcacataactcctgccagacagatcctccatactttcaactcgtcctgattgcccaaaaagtaaaaggccgcccagcatgcgacgagcgggacgaagagtgacatggcggtgaacccgggggagaactctaggtaccaacggacttcaggagctggtcggaggatgaacccctgaaaagagacctgtgcgttcatccccacacgaacggggtcagagttcagccgacgagaccggtgatgatacgatgcgtgcgaagaacactaaggaaggcccttgctggcggtactcacgaaatgcattccccacacggcgaccgtagcgaaacagacgacgctgagacccaagatgacgtggttcctccatccatgcattcccgtcctcctacccaagagggtgagagtggcgtacgagccgaggagggagacgatgatgctggcgacgacgacgccggggttggcttgaagggagatggggtggatgcggtagtaaagcgccagggcggtctggtctaaaggtggtacggatggtaggaggttcgtcagttcggttggtagggaagggtgaaaaggaggattatgaggtggcgaaggcttaccatgccagatctcgggtgagggatacatcgcgtagatctctcactcgccagatggtcgcttgaggtgtgattggtactgtcgatgaatatctgtaggaagctgattaagatgcaatgaacgagtcgttgaagtattagtctctctcatcgatgggtctttcaacacaggagagaggaactacccctttcgccctagagtcggattcacttctcccgttgaccaattaacgatcaacaaaccgtcccgtacgaagtgaggttggtataggcaaaccgtagggttgatctctatctgaatctgtgagcctactccatctagggtcggttttttgaatgtagcagtagtcaagtagtcgtgatgagaggcgaatcgtgggttcgagtctgttgagacgagccagaagatttaattgatttggattttagtgatcgcccctgaatcgatcaaaatatcagaatactagtaaacgtagtaacctttcggtgttgatcgtcgtcacgggcaacggggctcgatcacgggaacgagacgaaacgaggcgaaaccgatgaggaccgagaggagggcggctaggagcaagacgtgaagaggacacgtccccatcatcaaaagcgatcgagaacccccctccccctcccgaggtttctgatctcggtccggagcctagcggtcgttcgaaacacgttcggcataccaaggaggaacctgctatcaccgtgaccgcagccgagatgaggcgaaagtttcctccaaacgggcagatgacgacagagcgacgagaagatctgtacgtttcgctatcatctcgatctcggaatgcctttgaatcaattgatgggcaatgtgacattcggtttgttactatcgccccgcgttctcgggtgatgagcaaagacattccgtcgttaccccttgacagcgccagacgggagagatccgatcaggcacctcgacacctacatctcgcctcgtgtctcccgtaccgcgtatcaagggcatcggaaccggtcgcgcccaaaggacgtttcagtctccgacgccgagagattcaccaaagggaacaaaacccctcggaagaaggattagcgcccgcgcattcgcgtcgcagcctgtcatccctcaccctcctttaggtggatcatgggtcgtagtgaacaacacatgtagccacgaactagaccttgacatcagagtttgtaatttccgggcatacgcctgtctcgattggccggtttcaccttgacgatgacatccgcctttgtgctcgtgcacggtctcgggaggtttctcatcgggactggcaatcgatagtgattccccgatcggcttacggagcgaaagactacctcgacgcagaccccttttattctctaggcatctcgcaacaccctacccaccctgacgcgcatgttctctacctcaaccgatgcgcctgtaacatcgcgctcgaacgttatgatgccgcaatgaccgacatcgatactgcactcgatctcgtacaacacaagctgcaagtctgcgggctagcttctcgggaatacgatgcgacgatcaaatgggatgaaaaagctagactgggtcgtgccaagtgtttctacaagcttcgggagtggcgcaaggctagagacgcctacgtcgacgtcctcgagcaattccccgactccaaagaagcccatacggggctcaagcagtctatggctcgccttgatgaggaatccaaagggacgtacgaccacctcgccttgtatctacaagatcgaggcaaaggccaacatcgcctcgacgtggccgattacatcggaccgatcgggatcagtcattctactgagcacggtcgcatactcaagactacccgggctgtcaaagctggtgagctattgcttgccaacaaagccatcgccgccgtgtttccctctgattgggcaggtagcaagacgaggaaaaacagcaacctgctgcgtttcgtcgaagatacgccttcggcatcgagactccccacagagttgacctacaagtggatccatcagcctcagcttcgtactaccttgaaacgactttccagaggccccgacgtcaaacaaccgaaaacgttcccgattgcagacatgtacaaaccgaaacccaaggatgagggcgagaaaccactcgacccaagcatgatcggtcggatcgcgacattcgctggaattacctatgattctctcaattatcagggtaccggtttcaacctgatcaattctttagagatcggtgacccgtaagtcgtattaggggatccgccgtagcacgatcattcttgacacgatgttattgcatcccgcagctgcgccctcttcccgtactcgtgcttcactccccattcgtgtttgggaaaggccgcgtccagattcatcggagacgtccattttagccgtgctaccgaggatatgccggcgaatgccacgattaccatcaatcgaatctacgaccaacagctccaccggcgcaagcgcctcattcgcgagctgtgtggtcaagattacgtttgcctctgtcatctctgcgaagacgatgaaaaggacggcgagcaaaccgtgaacaggagaagaagaatcaaaagcaacttcgagatggagatgtacacgcaatcagtcggtacgagcggaacattcgccaagaccaaaggggatctagagaagtgcaaagatatagtcgacatcatccgacacacctactccagcgcgagaacatcgtccgtcgcattcgaaaccttgttgcccttcatgtcgatcgggtactgccatgttcgagtcgagattctcacggggacttcaaccactaggggcgccatcgaagcctgcaaaacagctctccgccgcctcggtatcgtactagccggagattcgaacaagacctccaaaccgcctataggcgatattccgactcgttcacccatcctctatctgtcgcgcgtgttccacggacacgccacaacgctgatgtctatgatcgctggagcgtattcttccacaggcaatgatcttcaggcaaagcgatgggctcaagcgatggtttgggcggacaagatggtcgtcggcccctccttgcctctgttcaaagaaatgaacaaggctcatatcgacaagttcgatattggacgatacctctgacgtccgtgtatgctctctgccagcggacagcttgcggatacagatcggcagtcgagttccttcgcctcgatactgcgataacgctgcttatccacctcccatacgacaatcctccatatcatattctcttgcatatgcgaaaatatctctaaaatcctcttcttcccacgaaccttgtacaacagtcatatcatacgagggcattacggacttgagacacgaggcggtgtctcgatgctgccgctcgcctgttcatcatttaagcacggtctacccttaccgtacagtatttcaatgtctcggctggcatgagcttccgcgcaggaaggaagtgctcgctcaaacttggcaatttcaaagcgatcacgcggtgtcgtggaagtttgctgaacgactcatgattattgaacatgatcaggctgtttgcgacagcttttcgttttgacttcgctcctatggtaagaactacgataaacacgttccatcagtcttttggtccgggatagttcggacatcgcagcaattgtgactggtactcgcctcgtcatatgcgaagccacgatcgtttgtgcacccatagtcattacgtcacgatgccggcaccatcccgcgtgttcgttcatcgaccagcagtcggcccgagccgagccccggcatctctggctgaacagcgatttcttattgttcgccttattcgatcggatccctaccctttgaccagtcgtagtagccctttgctttgcacgctttcctgccctcctcacctgtcaccaaagcatgtcaaagtgcgacctgacctttcatcctctgaccgacgggatctccgggttggtctttcggccggcggtcgaccttctacaactcattgatcgcgtcgagtatcccgggggatcccgtacacacgggaagaagagctttgatccgatcaatctcgagacattctcgaaggttgaacgacacacgacgacattagcggagtctttggcatagcgatcaatcctccctagttcggaaccgatcagttcactatcaaactctagctctcggcgggaaccacacgggatcaacgtcccttttcgtattccaagacctctcccgtcttctccttgagggtcgtccgcgtttcaaccccttgatagtttgtctgggacgagacgacgtttcgacaacgactggaagcgtgagagatcaactcgacggctcaagcttgccctcctttggatcgatccaccgattacggactggtttagcgtattgggacgccaaaacgaatttatcgtcgggaaccgaaaaaggaacgatcgacattccgatcgactcgatttggaaccagtaaaaggcgaaaaagggtaaagacgaagggcggacggggcaaagcgaaagaaagagtccgcggaaggatctcaatcatctgagtgatccgatcaataaacggtcttgtgagtcgaatcgcggtttcatctcggtcacggagagcaggggagaaacgcgtgatcagatcgactcgatactcgggttgagatgatggtcattcttgtcgagattgaactgagcacttacgtgcaccgtcggctctctgatctctcacagtcccgcatctaagctataagttgcgttgagtcccaaggagtcaacggctcgatccactcaaaggcatccacggtagacaaaggacgacctgatataccttcttcgttctgcgtgtgatctgatcacgagaaacgtcaagaaccgaatcgaacgacaagcaattacacgcaacaagccacaacgacaaggcggcgtgatcatcatcaccccaatcttccatcctctcgtttgacgggcaatcaaccagtatatactcagttctcttccaaccgaagtcgctacaccgccacatcacggaactctacttcgattgccgttcccgtcctttttcgagacgaggtttctccgaactcgtggtcctactcgctcttgtcagcgacgaaacgaaaaggcgaaaaagcttttgacggtcgcaatcttgatctcgcccgggatcccgatctcaggacggagtgttttcaaccttgtcaagccgacgtcaatcggacaagagttttgtgcagcgttcactggcaatatttgactcaaggtcaaccataactccggcatatacacctcccatctagtcttcttgccaacgactttgcacctgcctttcgtcatcgaatctaccaaccgttatcgaactccataccagagcaacgcacctgctcaactctttagaagtaccgctcaaccaatagctcacgaaagcacgatctcaagatgggcgcctgtatgtcatctggaggtggggacaccatcgaagctcgaaccaatcgtgatctagagaagatgatcaaagaggtccgtaccgtcatcatctgcttctcattcgatcgtctccatcgtcctcgctgatcatcgtcaccttaactcctcgacaggacgagaagaagatgcgccagcatgtcaaagtgagttccgggattaggcctggtcaatgatgggacatagcccggacaatcgttgttgataccgtcttgatggtcatccgcagctcttgctactcggagcgggtgcatcggggaaaagtaccgtcctgaagcagatgcggctgatccacaacgtctcgttcacccctgccgaactggagtgtgagtcctcatcacgcgcatgtcggtgtaggtacgcagctgatcgcgttcgtgtgggaatttacagattatcggcagttggtgttcagcaacgttgtgaacgggatgaagttgatcattgatgcgatggacgagtgggagatgagcgtcgaatcgcataaccgggtacgtcgcctcacgccgcttctgatttcagctctttcggcaacttaccctactatccttgtcgattgtggatatctgcagaaatacatcgccctcgtggataatccgcctgatatcaaggacggcgagactttcccgatgcagtatcgcgagccgctggaatcgctatggaaagatcagggggtccaggaagcgttcgcccgggggaacgagagcgccttgccggagaatttgccttagtgcgtctacctcttcccctagttgccaagcaagggaaagctgtggctgatgacgtgcatggcgggaatagtttctttgccgatctagaccggttttggcggccagactttacgcctgaccagcaggtacgtcgtgcatctcctgcccatcgcgttggatctggcgattgacacatcgtgggctgcgatactatcaggacatattgagggtgcgagtaaagacgacggggatctcagagacaaagtttgtggtgggagacttaacctactcgtgagtcatctcgagcgtttgtcagatcgcccacatgcatgttgataccggtgggagtgggcaggatgttcgacgtcggtggccaacgatctgaacggcggaaggtgagattcacacgctgatattcatggaaaaataagcacgactaaaccgggcgtgccgcattgtagtgggtatcatgctttgaaaacgtgactgccatcttgttcttggtagctttgagcgggtacgacgagtgtctggtcgaggacaaggactcggtacgtacttcgccgataagcgctacggagactggccccactgacagagcgtcgcactgcagaaccaaatgcaagaagccttgatgcttttcgattcgatctgcaactcgcagtggttcaccaagacgagtattgttagttgttgttccggctcgagcaaagtcatgttcatggggctgactcgaggtattcgccacttgtgtcagatcttgttcctcaacaaggacgacattttccgtcaaaagatcatgaaccccaaatctcagattgtgcaatactttcccaacttcgatggccagccactggattacgaagccggacgagactttttccgaaagcaatttacgaggcttaataggtcgactaccaaggaggtgtatacccagtgagtttgggacgaacctcgttggatggcttgtgacgggttactgacccgcctttggggagtttgcctcagttgcacgacggcgacggacacggcgatgctcaaggtggtcatggcagcggtgcaggagtgagtgcgatcgatgcgcccgaacccatgacgtcctcgttctgaccatcggacctctgcgtagcacgatcctgcgaagccaattgagagatatggccatgatctgatagtcatcaaaggtgataggcgcgtgtacgatggcgtggtctcttctcttcgcatcttggtcttcctcttccggatctctttcctctgcacacatgtatacctcgttcgaacattgctccctagctgctatgcgtatattagaccgagaatcctgctatccaggctgttgttttccccaggaggccaagggactttacttcggtcgagatctttgatgactaagcaagtctggcgatctccgagccttcccagacgacaatgagcaatcgaatgcggttcatcaatttcgtcctcgaacctcttctgcttcctcggacgaagacaacgaggctccgactaccagcaatttgcgccatgtcctgtcaagatgatctcacggcggtagacttgtcctcgaacgtggccgtcgaagtgctcgagcgagtctcggcgggctcggggagggacgagaacctgtggtcttttatcgacatcaacaagtgagtatgttgacgttgggacccgcagagcaggcttgtacagatatggactgatgttatactctaaatgatacttcagtataacgggtaccaatctcgaggacccggaaaaggctcagaaaatcgtcaagacgtgggatgagaggcacgacatggagatattctgtgacagtggcgtggatgaccaggcgagtctgccgtccttgtttatcctcgatggcacgtcacatcacgtcactaaacaccatcgaacctgcgtagatgatcatccacatcccctttatccattcgctacgccttcgatcgctcttgctcttgccaccacccgtcacaaactcttaccgcccgacacggatacgcatgtataccaacctcgcccagccgccttccttcagcgacatcgaggacggcttgacgcctgtgcaggatatcaatctctcacagagtccaagtctgtggcaggccggggtggacagcgagggacgcgcccaagggggccggagggaggtggaagagtggcccttgaaggtgcaaaagatggcaagcgtgtggagcgtgacgttgatgattgtgagtccgatgtggcgaggcggcttgcaagacgactcgtactgagcgctcgatcgggtttgtagtctgatgcagaagggggcgacaagtctcggctattctatatcggtttcaaggtgagcctcgagagtctgcagttttaccaaccctccagctgacgaatgcgcaatgcagggtgaatctcggaaccctcgagcagccgagacgaacactccagccgtacccgcagcccaaggcgccgacgctcccgtcgaacagctcgcagagaagaagggcgccggtcatagcgccgtgcgatgagcctgcgagacgtcaagggccggaccatagcgaattccatttcttgatcattcatattcgacgagctttgtacattttcttaaatttcagatacccattccgtatatacgccgatgttcatcttgcccgatcaggacgagagacggttagccgtgttcgcctatgtcgacagcgaggtccgtgcctgatcttgccatcgacgtccgacatggccgatcaaagcgcccagcctacaactcgggggtatcggcgtagagcccgtcctcgaacccatcggggtacctgccaccggcaacttcggccgcctcgacgacctgcctgacctcgtcgacttcctctttggacaagtgcacgtcgacggctccgacgttttcctccaagtacttgatcttctttgtcctatcagtggcagcgggatcagccaagcgggacggggcgcgacgtgatgaggacagagagcactgcaggggactcacccggggatggggaagatgtcgtctccctgagccaagagccaggcgagtgccaattgccccggcgtggcgttcttcttcttggcgagctgttcgagcttgtcgacgatttccaagtttttgggaaagttctacatggtcgaggagacgatgccattgttccttctgatcagatcgatgctgggcgactcggtatgcagacgatggggtgtgactcgcctctttgctgaacctaggggaatatttcctgaaatcgccatcttcgaaatcatcaggcgacctgaactgccctgtcaacagccctcgtcctaatcccccccgcatgcatcccgtctggtggtatcagcctaggtccaccctcctttcggaaccccgggactgacctaaggggctgtaaggaacaacggccgtgcccaactctcgacacgcctgcaagacgccgtacttttcgtccccatccttttcgcactcgagggcaaagggcgagtattcgagttggacggcgtcgatatggacgattttgctcgctcgacggagggtgcgggcggatatctcggagagtccgatgtacttgatcttgccttgtctgtagggagggggggaaaagtcgagacgggcgtggtatgagtcaagggggcgcacgcaacgcggcgttgggtctgtatcggactgactgttgaaggtctttcataacttgcatcgtcttctcgatcggggtcttgccgtccgtacgatgactataaggttgggatacccggaccgacgaaacccaaacacaaacccatcaacctcccctctgaccgactagctcctcgaaagtgcctcggcccacttgccactcacacgtaatacagatccacgctctcgacgcccaacctctgtagactcttttccaaggccttcctacagtactcgggtgaggaatcgaccgtcatcgccgtcccgtcgaattgagcggcgaatttcgtcgcgagaaagaccttgtcgcgggcagaggggttgtgtttaaagtatttcccgaggaggtcttcgttgtcgccgtagacgtccgagcctgcgaaagagggtttgatccgggtcgggatataaagtcgtagcagggcaagcacgagtcatggggtagtttcgatcagggtaccagacgatcagagtagatgcaatcaacagagaatcaacagagaaaccaaccgggtcatatcagcttcgccctctccccgcttcccaccggtatagcgagcgcacgactgactgtcccaaaacgtctctcccaactcgatcgcccgatcgagcacctcgaacctcttttcatcgctctcgtaccctccgtaaaaggccgagaggcccatgagtccgaacccgagtcgagggatttccggaccgttcttgcctagtttggccgtggggatgcggggttgggtgggggtggacatgatgtcgatgttggtcgtgtggatctgggattgtaggatgtgatggagtgatcaagtggaacgagaacgacgacggcacgatctgggtacaggaggttgtatcgtctctctctatatatactaccctgctactccctgatggtgaccatgtcgtcgtcgtcgtggtcactgaccttgcgacctccacttgatcgccagctcactcgctatcgtcactcgaacggcaaaactcggcatcccgtccagccacctcgttaccaatcgcgagcttcctttctgacactccaccgggctatcactttgactccctacagttgaccgagcgagtagcaggtcatgttggtcatcccacggagcctcatcaaaggtgcccttggcatcgagcttagtcatatccctatcgaatcgggacctgacctccacttttcatctcattctgttgccgtgattcgtcatatcactgcccccggggtggttgacgggtgaccaacttgccccggccccctttgactgacgagaaggcgctgacgagatggttctcgatcgttcttatccaccacaagaacgatgcgagggatccggacaaggttgtacgtctaggactgagggaacgaggaggaaggacatgtcccagtacgactagcgaccatgaatgtacgcgacgaggtcaagtttcgggagtgaatttacttccggaatcatacatattgaccctctgcatcaactggatgtcatggaaacatcgaattcgagtgtcaacttttgattgcgaacagttcggtcgttgtcgtatcaccactagatgacgcacagccgatctgggatcatcgagatgtatcctgtacctaggaatgtcatggtcaaggttatcaaacgacgttccccggcgttttgtttctttgataagccacttgtatgtgtctagtgcagtgacgtgtcatagtatccttggtcgatatcatcacgaaccccgaaccgaagtgtgaaaccaacgtcgacgaggtttgactttcaatctcgattcatacatgtcgacctcgtttaacccaactcccgtagactcgtcgttcacgctcatggtctaaggggaccgagttctctgcacatacttgggatcacgtgcgggtgatacgataataccatcaaacgtcggaacggcaaggcggcttgaaacgacgaggtacgattacacgacactcgacttgttcgatctgaccgcaatccccgcggccgaaccacccctatgaaccctacctaaacccactcctcgccattcgacaaaagggtccccatcgctcttcaattccctcttacagctcgaccccgctcggttcaacgttcggggtagacgtggggaggaggggagggtaatcgagatggaggacgatcggatattacaggatttcatccgtcgggctactctgacgcatgatttgggtcgtggtcaggatcaacaacaacaacaacatcaaaatcaaggtcaaagtcaaagtcgagatcaaggtccttcctcctttccctacccatccggatccggacccggatctgctgccctcacgactgtatacgaccaaccagccgatacatccaacgaacccgcacggaacctgtaccctcatccaccatccaacccgacccaacgtgatcgacgacgaacgtccgatcgttcccgtcccgatcatctccgggagtaccaaaccggtgctatggacttgccggtcgtcggtcatcgatcgcactcttcacgtgcttcacggtcggggcagggtcaggaaggtcgaaattacaggagctctgtttatggtgcctcacagggtcaacatgggggttccagtcgatacccggacggtggagaacaagactatcggggcgaaggtgatcgtgggactcctcgttcgggagaagatcgtggtgagggtgatggtgattcaggaacggagagtttcgaagatcaaggaacgtacgatccgacacccctgacgcctgctcctgatcatcgatcatacgcgcccgagtcgagcggggtccgatccgttcccacccgccagagtcagttgacggcggcgacggcgacgatgatgatggggaaacgacgaggtcgtcctgcattacctcctgaagagcgggacgaacgacgtcgagaacgagcccgtcagagcgcggccgaagccaggcgtaagaagagggacgtcgagggggaacgagagtggtggaaagaggtcgagatcgaaaaggccgtgctagaggaaaaataccgcacgttggtcagagagtgagtcgaggcgggtcgggatcgagctgaggctaccctgatgcacttgtcggattcatcggccgggagctgatcgtctgcgaggacactttgccatcgcttcttcgagcagtcactcgaccttgaaatctcaagtagcctctatcccctgcctctccctcctgaacccacacctcgcccttctcgtcaacgcgccttcataccctatcaccggatccaacggaccaatgttacagctcgtgctcccccttttactccaaacgatagcgaggggcgagaacgggatcgacgtcgacgcgctgatcggactgattcaagaacaagggcaagcaagacgggcggattccagtcgaacgatgcagagggaacgcgcgtacgagccaccgcacaatgaccatgtggacaggtcgagtcggaatacgaggaaacgcaaatcgagcgagaggacaagctggtccgagcgggagatggccatgccgatcatagagggagaaggcgatgggagcacgagtacggattccgctcagtctacgcctagggtggccagacggcgcgtcaaacgagtcaggatggagttgaccgggcagggtgaatatgacggtcgagatagactgtcggcgcctggacgggatccgccggataacaccgcaggcattgatgatccggatccgttcggcactgggatagacgaccatgacggcttacccgagacccccgggggcaacatcgctgctacgcccagtcgctcgccggtcgaaccacgaacatcgatcctcatgtccctgcgcaaacgtacgcaacccagtacgctcccggaacctatcccggctaccccgatcgactcggacgaggacgacggggatttcatacccgaatccgagctcgacgagaacggtcctacaccacgcaccgagcaagggccgggaagcagtccagggacgtatgacgagacaccgcggacgggggtagagggcgaagaggaagacgaggatgacgagaggttcgattacgatccggatgatccagactttagtcaaccgatcgtcgacgtcgccgtgcccgcctggtttggtacgacgtgggctggagcgggtggagccggcgagtcgagcgagtcgagtgaggcaatcagggaacaggcgatcgggaatgaagagagggacgaattggtcgctagattacgcgccgagatggacaagacgccaagggaggactgaaattatcaacgacacattagaacggaatagcgcggccaatgtatcaatgtcaattggcactaagcttgtttatgatggactcatacccctttttgccgtcacgcgttgtgcccaagcagtctagctaacaaatagaggtatagcctttcaatgtcgttttggacaatagcccgtctagttgcagtccatcgatctcaacattcgtgcatgctcgctcactcactgcttggcacgacacacagactcatctacccagacccttcctcaccctagccaccgccttgccagattacaaagcttccagcgatcagttccttcgaggtaacataaaccctcacagtccttcttctcccccttgaactcaccccctcaagcgaatccctcgcccccaatttgtgtattttacttcagtcttgcccggctctggtgcgaagggaagagacacccagaccgaagttaccggagtggtatttcaggttgtgaggcttctaccgacggtattgttactaccattgctaaacgagaatggccacatccgaccttatctcttgcttaaaaaaattgttagagattgaaaaggctgttcgataactctcggttccgaccgtcgaacgtttgtaccagagaatgactgggtgcacagcaaagatccttcccttcgtcaagtggcaggtagaaccaggctctcgcccagaaagatcctcgcgccgcagagaacggaacggtcgatcccgatcttggaaaagagccctttgcgatacagccttggcgcagctaaagtctggagatgccacgaccaaatcaaatggatgctgcacatttgtttcttgaatacagaggcatggagcgagtcatccatcgagcaacgtggatctcaagctgctggacagcatcttcccttcattactctgccaaaatatgatacagtgccgctgcagcatacatcgcctagtctgctctgtgtccgacttgtttcaagctttgttcacatttctctaccgtcagcttggcctgcttaagcaggggcagaaggttgtcgggcgtgagcaccagcgtgcctctgctgtcgagcggggcggtagggtgcggggctggcgctcctgcgggtccgtagaccggtcgcggcgatcctgcgcctggtctcacgcccagattcgccagcattcttcttgaatctgaccggcctatagtacggtctccgtcctccaacgttccgaagggaacagaaggctgctttactggtagattcgggtcaggcgtggtccgcgcagcacgcgctctgatctctagctccttgttggtcggtcgatcccaatcactcgcgctcgacgaggcactggaccttttcgagctgtcaacagggctcgttaggccgatttcttcgcggagactgggggaaggtgagaggcgggaaaccacgcggctggattttctcctcaaagcttgcatcttgctaggcgctttctcgccgctcctcgaagtgacgggagggggaacggacgagctgaccactgttcgctgtgtagggacgctcacaagatccagcagcagtccactcgactgtgagcttctccgaaacattccggcaagacccggacgtgcaggcgatttcggcgacttcgtcgaagacgcttggatccccaagcccgttctcgtcctcatcgattggtcgaaatctgacccgttgggcgagatgggagtctttggaatgtccgcctcggcattcacgtttgaatttgacgtcgttcgccacatgtctcttagattgaagaagccggatcgactggagcggcgcttggtcatcttggctccggcgtcgatctgccgctgaattgttggaatctgcgactcggtaggtgttggaggtagtggtatgtcgagaggcagtggccgattctctttggtggatgacctggacaacctgatggggtctcgctgagacctctgatcggcgatcgccccgtactttgaacgatcggcttgtcgatatgtatctgatgttcccgccggcgtctgcaagatgtcccgcaagagttccacctgttgcagcgaaaattcctgccggcccatagatccagtggagtctgccgtatcatccctgtccagcctctgtagcgagtccagatgaggcagtccagcatcgagcggtcgcagttccgtccgcgatcttcggataggaatgttgccgcgcgccatagtgggtgagggtgtagaatcggacgcgagcgtgatccgccgctcacgcttgaggtccaagtcgtcgccgggcagtggactcgcaggttgagactcgttcgtgcccgtctcgcccaattgtatcagtatatgagccatgtcccaccatttggcgaattcctcgtcgatgatcgcaggcttggacgtgctatcgtgcaacggcgcgggtgtcagtctcgattccaggacggctcgttgcgccacgagcgctttcagatctacggagtcgagcacgctggatcagctactgccatcaaccatgaccgaaggggcgtcgacctacccatcacacagccagcaaactgtttggcagccatgatgccctccttgactcctttttgagcactggcaacccggctggggatcttgaggtcactcaacgagactcttcttccggcggacgacgggctcctctgcctgtcttcttgattttcggcgtcatgtgccgacctgagcgcttgcgggtcgctcgagatgcgtgagctggtggtcgagggcgtctgcctcatgctccgggccgaggccgacgtctgaccgacctcgagaggcgaagccagcctgaaagctgaccccagtggagggagaggtggcgacgccgtctgacggtcccaagtcgtttgttgctgctgttgcatggcaaacgatacgggcgccgtcctcggtgtgaccactggcggaccatccgaagatttgcgctcaaacgtggatgcactcgaattcgacgacccgctcacgaacctccatccgtccgagacttttctcccatgtcgcttgctcatgctgctcaggcgtttcagagtcgattttcgtttcttgtccagcgggagaggcagtaaggcgagcgggagtgccttttcctctgacagacgacctcgtgacgatgcccgtccgagcgccggtggagagcccagtttgaactccttgaaccgatctgcatccatctgcgcgacctctctcttcatgtcgttcatcatgtagagcgtttgcgccgtgcccactgtccccgccgtgcgtccgctaacccgtcctaccgatacgtcccgctgctcttcatcgcgcttcaacagctctcgtccagcctctgcctccctagggcttgtcaagctagctcccctcggcgtcctctgtacgtccagcacttcttcgatccttcccgcttcatcatgaccgtcgacctgaaaactctgatgttgctgctgataataaggcgaagccgggcttggactcggtaaatggaaccccacgctgaccaagctgggcgaggtgggtagcccgcccgacggtcttctcgatcccggaaggccatccacgaaggccgatgagattgacgacgaggaagcagccgaggaggagagtacggtgtgtatcgatctggtgctctccagagtcgacattatcggagcagctcgagaggtagggagaggatcgtcgattcgtcgatgggcggtccgactcgtgtcgacttttagtgacggctttcgatccccgtccctgtgttcctgcgactttccatccgagagtgcactcgatcccaccgcccgagattgggctaccacggctgaagccgaggtggacgagaacctcttgtgcaaggagacgaccctctgcatcatccccatccccttctgctttcccttttccttaccgagcgtcccgtctgagcctgatcccccatgcccggtatgtccaggacgattgaacgaactcggaggagctcggtctgaacctgtccgaggtagaggcaagagtgatgggagcggaggcgttccttgcgccactccattcgaggtttggagggcgtttgagggttgaccatgataactcttcctgaaccctttcttcctgctatccgcccccgccttgatgtcttgagcttgagtcgggagatcgatttgcgaattgttcttccgaccattatacgagatcaatcctaggcctggtccggcgagtggagaggttggtgtcgacgtcaaaggtgaacccaggggtaagagtcccggcgatgaaacggacaacccagatgccgccctttcctgctcttgctcctcttcgtcccctaggagccgagcacttttgatatccagctcgacatcccaatcttcttcctcctccatctgatcatcctcctcatctcgatgacgttcacgagcacgtccaccgtccctattctgatgcagatccagatccagatcctgatcatcgctgatgtccaaaccggatcctacggagaacgattccggaaaagtccgacgagtgagcaagactgggggtttgctgctaggccgctgtatccctcctccacttgaccctcgttcttgcttctgttcttgctctggctcgtcgtctcgatgtttcccttcactagataccgcccagctcggatgaaccgaggttgagtttgacttagacgtcgattctctctgcgtgatagaccgtcgagcgggagtgggacgggtcggggtgagttggaataagaaatcgtcgtcccagttctccgtcggggcggctggtttttttttccgggggtgaggaggatcgtcaagtcgatcggatgattcaggattagaggggtagattttagacagggaaacggaacgaaaggggacgacgggacaggacaggacaggatagagaggcaaggcgaggtgagtggatcagctcgatttatcctggtatgatacgctattcagggcggacactcacacttcatcgagctcatcaccccgggacctttcaagcgctctgaaaaggaggtatagttgactggatccgagttacacgtccgggtatgatggttgatcctgaagcgactctctattagatcatttgatctgatctggtatttgacggggttccgttcgagctccgtgaaggcggtttgttggccagaagagcgggaatttcgttggaaactgtcgtactaccactcggatcgatcttccagctgcccatgagctgtcagcggtacgtatctctacgatctagaccgatatatagatgatagagtagtagtgcatagtagttgtttgagtttgttgatgggaaactcgaactcgactttgtaaacaacaccacacaacgtagcacactcgtcattttggaacattgacaccttgcattgacatacattcatgaccatgacaactcgatcaaaacagtcttaaacgacctcttaagatcgtaaactaacgatgagttcgacactaaaacgttcagcttcgtcaaatgccggagattcggctcaaaacacagccggaaaacgaccaaaaatgaaccccgagcaggaacccgacctacttcccaactcatcctcctcctcggacgacgccctaccacttgcttccaactctctcgaatcggaattcctggacatcctatctcgaccgacagcgctttccaaactatccgctctcgctgtaagcccaccccgacccgcaaaccgcagacccaaccgggctcgtctctgtccctctttgaagactgacaaaatcatccggtcttgatcgactcacgaccatagagcctccctcgtcctcttccggcattcgaacccgtctgcccgttgacaaccacaacggcctgctctatcagctcgtccacatgtccatacgtaagcttccgttttcctcttcaaaccaaaccgagtcgagtcgagctgaccgacgggggggaaggcagccacattacgaacccatcatccgagcatggaccgaacctagattaggacaatgttcttacctgaacatgtgttatggagatgtgagtcgagtgccctgagcgtcctcgtatacttcccttgtcctctgttcccttctacgatcaagccggagctcatccgttcgtgacttcgatcacttgcgcttccttcccgaccgtgaacatagcctttattccatgcaaacccttctctcacgaatgccaactccaactctgggtctggagcaggaggggcgggaggatcgggagggggaaaacaatgcaggtatcagcattaccggctcgtcccccccgtttccacatcggatcccgtttcttctctcataccatcgggaacgatacccaattccacactaccgtcgacatcgacgtcgaaactaatggagaagaagagaggcggtgaaagggggataggacggacagatcgagtacccgggttatcggcgacgttgaggcggaaactcgtcgaacgctcgacatcgctcggggtggatgagatgggctgtcaaaggaccgacaacgttgaagtcgacagtgaagatgaggatgagaatgaggatcccgaggtacggagagcacgttcgacacggacggcaggatgggatcgagaggccagacaatggttgaacatggacgtcaggcagttggacgagcaggtgttaggaaagtgagtcccccgcacttccccggtctgcctgtcgtccgcggtcgaaagtcggcggggtaaagtgaaatcggcggtcatttacatgtcctcgtcctcgtccatgtgctgccatggtggagtaggttcgagatgatcctcgcggatccgccttgggatatccatatgaacgtgagtctcggattgtcagtcctggtcgctatgcaaatttcactccgcacacgcgccgacgctgatttcatacgattcgctcgctcgctcgcaccatagcttccctacttgctgctgacggacgacgacctccgacgcctgcctatcccctcgcttcaacccacctggggcctcctcgccctctgggtgacgggccgcgcgatggaactcgcacgagagttgttcaacctctgggggtatagacggatggacgaggtcgtctgggtaaagacggggcaattgggcggattggtacggacgggtcggacgggtcattggctcaagtgggtgtgacctctttgtgcttggtcgtacgatctcggctcattcggtcctgcctcgtagtcatacttgcgaacacctcctcctcgccgtcaaactccctccctctagcgaatttcccaaccggtccgctccgatcccgtggcacgatccggctttggcgcacttgcgacgaggtatcgacggggacgtggtcgtaagcgaggtcagggagacgagtaggaagccggacgaggtgtacgggttgctggaaaggtcagtccggacagtcaactatcaagtctggctgtattgacgatcgagtgtggtcctcgcaggatggtgccatcgggacgaaaactaggtacttcgaccgaaagcaaaaggccaggagacgattcgctcacgctctctccgggttcacagaaatctttgggcggaaacacaatacacgcccagggtgagtcggatcatcacccgcatgctctttactgccagctaacagatgctttactctgaatttgaacttgtagctggctgacaatagggaatcagcgtgagctttgcacctcgcgaccgttccacgtcgcagtccctttggctgaatatcgcttttcttgtttgtagtgggagatagcaagatcgtcgatccgacactcaagcaaaaggtcgaggaggccaagatacttttggacaacgtcgtcccaggtacgaacaagaaggcatgatcatgtacattcgtgccagaaatgacgggtaatagagcttccccttccatcgattgtatatgattcgattatacccctttgcgactacgaagccgagcatgtctacgttccctttctaccggacgaaccatgttccatccattcggcgaccatttttcgcatcgtgttggacctgggaatgtcaatgttgatcgctcagacatggtcgcgaccgagcgacgcggacggacaaacctgttcatacagctctagcgccagccacacaatgacgatccgatgagctttgcgaatgatcagctgcggtatcacacccaagttcgactcgcatgcagactcctcccttggatgtccctagctattgtctcccagtttaaccccgtcgctcggggatacatgtgttggaacagcttcttgtcttgttcctttgcacaacaagtggagtgattcgactacaacatccacgcaggatgctctggctgtactttacctgcgtccacgctccgctcttctgaacgggcccgaaaaaggtgtgtcggtggtcggtctttctgcatttcgtcggcgagtccggaaggtcggtcgtcgatgacgctggagtcttgcgtttcttgggcgaggcgatgatgctagggtttggtttgacgtcagacatcgtggcgagctgtagagtccagcacgtggagtgtgggggggggacgcgtcggtcaataaatcgtcatcaattgtcggcctttatactgtccaggaagattaagttgaatggagaagcccgagcggtgagtaggcaagtgaacgccacgaccctttccacctgttcgacgcctttgtttcgctcgtcaaaccttaattcatcgcgatatccgtagcagatcgacttcgttctggatcatcaatcgaaagcgatcaccgtgggcttcctgacggagacgacgatgatccaccagacgggattgcagaggtaaatcctgatacttctccagtatatagcgatgagccccccgcttacacgcaagatgcagcgccgacctcggggactatcccttccacacagtcatgtcggccagggctctggtagacatttacccgatcccttcgcacatccaagccgaatcccgaccggacacgcacaaccctttgtttggcaacacatcgggcaactgaaacacaaacaagacggcacatgttatacgctccataacctgcatacaacaccccctcaatccgggagctcgaaagacctattcaaaggctctcaaacccctgctactgaaacagagcgaagataccgaccgagcgcaccatccacgtccgcaatctcgtctccacctgcgacacgtcgaaaggaatcgtccgatcgatacgtctagtcgaagagtccgaatctgtagcgaggggaaataagggggggggcaagggtcagtttcccaggtgtcgtcaacaagatcgacacacggcgtcaaactcaccccatgtcgtcatcggaaccctcctcgtcgtcggccttggcgtcctccttggcctcctcggcggcgggagcgtcagtggcagcggcggcagcaggggcggcagcggcaaaggcctcggggttggcgaggtactccttgatctgagccgatccgtcaaactcgtaatcggtggccaacgagatgttgagcaagttcttgtacgagttgaccaacgagtgaccgaccgaggcgatggtagggtaaccggtagccaacgagatggtagcgatctgcttgatcccggccaagaatccgtcgaggaggaccgactcgtcaatgtcgaggatctcgggggcgaaagcgttgccctcgctaaagatctgctcgacgaccattccgtaggtaaacggcgagatgttgagcatgttcaacaaggtggcctcggaggttccgaccttgatacccttctcgaggaccttgacgtcgttgacgatttcaatggtaccacgggcgatcttggtagggatctgcaaggcctggaagaacgaggtcttaccaggctccataccggtgttaccggcggggacgaagacgtcgttgggtgcgacggcaccgggcctggcaggggcagcgaccttgttggcgacgatgatctcacgaatgtccttcaagtcacccgaggtgaagacgaaaccgatgtttcccttgacgaaaggcaagagcttttcgaactgggggtggtcgttgatgattcctcggagagctcgtcggaccatggtgttctttcccatgaggacgacggccttgccacggagagcgacacggatctggtgcaactggttggaaccgacattgtcgatctggacaatgaagatcgaggctggtgagcaggtgggggcggggagggtcaattggatgttgctggtgaaacactatcgacctcgaccatgacactcacggtaagtctcgatgagctccctcaactgggcaaagtaggcggtcttctggtccttggaaggcattttgaagcgagtttttttacttgatgtgtttttttaaagttgtaaaaggtgacgagtctcccaaatgctccgtggagatcagaaggatgtttaaagactagtcgatgagctgaatgcttgaagagaagagaggagaggcgggtcggggcgggagataccaggtggtaggtgatcctcgacaagaggttgatgtcgtccatccgtccgtcaaccccaggtcgaacgaggtcccgcggtgagtgtgagtggaaaagacgaaaccccccgggcccaagtgcgcgcgtaattttgtcacaaaataaaagcgcagggtgtgttgagcatgttaagcgcaagacaagacgcgtgagaacatatagacaagaaggtagcatattggatgatatgctgatgggatgatgcggtcggatcgtacagttatgatcgaaaggtcatgtcgataacgttctcatctcgatgtatcgccttgggtattgtacattgtaattcttttctcacggcgctctatcgaatctgtcctcgggtgacgatctccttgaccactcctgcctctccttgatatgttcgtcaggctcattttctaccagccgggaccctaggctgtacgacgataggtttagaccccttgacgatcagattgacgctcgtctgtcatagtaccccgacgccgtcgcaagaacaaagcgtaccgatcgataagatgagcacgcgtcgtcccctcgtcacgcccaggctaggtctgtcgcagactcaccctgatcgagacgttccccttgttagtcggtaaatctccaatcaaatgacccgcccagccataagatctaccccgtcctcaaagtcgcaccgatcagccctcttcgtcttccgggaccttgccctgctgtgccaaagcgattttggactgacccggtagagaatttgcggggtttgaggtcaaactccattaacgcccttccgatcctccctgcgctaccctcttgctcgacgacgaggtgaaaggtatctgcggcggctatgaactcgtcggcggtcatcttgccggcagcgtaccgataggtagggatggcaggtactctactccctcccactttccttgatttgacgggggcgacccgcttacgtttcgctgacctcgagcacgattcctcagcggcgggtttgacgtcgactctagagctcatccccctgtatacgatatcgtcgtccgatgcgtcctcttctgaattgatagcgctatttccgttcaccttgcctaccaacggctgcccagatctatccgacgactcgacctcgacttccttctccacgacgtcatccatacggtcgacgaccctcgggagataatcaagcgggggagcctcgatcatgagcatgttctttggaccttcgtccatgagccagttgcctttcacaggggggacgggcgggacgaaagggttgtcgatgaccatctcttcttgctccactccctcttcttgtggtcggcggcgtgtctgatgcgcctcttgagtggaggagagtgggaagaggtgggcgaggggaacgaacgggctttcttgacgcggtagttgcttctcgacgaacgattccttgacgatttgagacgctcggagttcatcccgttcgccttcagagtccgagtaaatctcgatgctggtatcgatactgccaccagagcggaggctagagaagaaggacatgctgggccgagcgatgatgatcggtgccagtacatgtcaagcgcaattcgaaagcccatgaaatgggcgagggggaatattaatgcaagacggagttatataccttctccgacctggtccgcccggagttcgggctggtgattggttggatagagggccgaagaaggaagatcatcggagctcagttgtatgtcaaaggtagtttcaaaatcaagcttttgttcgatgatcgatgatcatcgctgatcatcaccgggtttcggccccagcaatacacaaacggacaggctaggattgctcgctcgaagtcaagccaaatctcatcgtactccccggggagtcaaacctgctgacgccgaagatgcgacaagcgcaaaggcttttcaatctgtatcaattgaagtcgacgatcgatctcatgaacttcagatcagttgatcaataactaccctccacttgaaaccgatgcttcggtcatcaatagatcggaaacgtgcctgcgggagtagttgtcgttctcgatttgattacgcaatttgcatccgcttggtcgtgactaatacccgtcgacccttgggatggggcactcgtcgaacatgaacaagtgctatataagtacaggaagcatgttctacaggtcggggacagctcaaccatcacacctccttttacaacaatagtcaggtactgtgctttgaaatcttatactcatcgaaacatcattagcaaacatgtcggtcgccaacaagttgatgctctggactgcaggtaagccccctgtccccctgctttcaccgttgacttcggaatggcgctcatcttcgactatcataatatgattacagagactcctaatggtgagcagaaacaccagtagtacgaatgaccatcgacggacgtctgctgatcttctcccgcggtaccgatcggtataggacacaaggtaagagtcgaacgctttctgcacacataatcagcgacccgctcacacccgttcctctgcgtgctctttacagtgttccatcctccttgaagagttgaagaaggcctacggtctccaatacgaatttaccggtctgagtttctccaagaacgagcaaaaggaagaatcttacctcaaggtcaaccctaacgggaggatccctgccttgacggacggggatcacaacgtctttgagtcgatcgctgtcaaccagtggttggttgacaactacgataaggttagtggtaaccggcggaccgtcttgctgtgacggtgaagtactgatcttctcgagcgcgactgcacgttttcatgcttttaggagaacaagttctggttcgaagaccccaaggagcgtagtgatgccttttcctggatcgcttggggtcaaggaggagtcggacccatgcaggggcaagccaaccacttctaccgttacgctccgaccaagattgagtacgggatcaagcgataccaggacgagacggcgaggttgtacaggcaagtcctcgggcgccttgttttacggactttgggggttgtaatgttgatgattcgctgttggacccagtgtcctcgaagatcgtcttgctgggaaacgagagagtaacggcggtaccaccgaacccagagactacctcgtcggaaagggcaagggcaagtacagcgtggtagacatcaaccgtaagctagaccgtgctctcgcatcgccaaccccgaccaccgctgaccgacttcgaatctcaacgcagttttcccatgggttcgtctcgcctcgtgggccggtattcccgggctcgagcgtttcagccacatcaaggcctggttggagaggatcgaggccagggacgccgtcaaggccggtctcgacattcccgtcaagaacaccttcaacccgaacgctactcaggaagagttggacgccaaggccaaggaggcgagcaagtggatcatgaaggggcaagacgacgagaagaagtagcaaccaacggggctcgacgggtcgaggtcgaggttgtagacaaggtcaagagaaatgataccgagcgtgtgaaacctttatgagactcgatgcaagaaaaccaactatggcaagtgatccattcatgctaccatttactcgaagactcgcgaatccctacccatttgtccatcgttcgaatgagggtttcatgattggattgctgcacgtcgacgacaacgtcatctcgctacgacttgtgtctcttacgttgcgcgtcgcctcgttgattcccaccgatctcgcacgatcgagcgtctccggaggttcaagatgttctgatcaattgatatgtgacagagggttgtacctatcgtcatcacgtcgtttcaaagctcgtagaatcttaccctcttgacaaagtgacggattggacatcgcccgttcccgtcaaaatccagctgatccgccatgtcgagcgtcaaagcaaagctcaaggacatccagaagcacctcaaggcggaagagtttgacgaagtcatcgagctcggcaagcaggtcttgaaagaggaaaagggggctacccagaacgtttaccatgcgtgagtgtcgaacatcagtcctcatcttaccatgtttctgatcctgaggtgtgcgtgtacagactggtcttcgccggagtggcatattccaagctcgaacggtatgacgaatcggaaaaggtttacaaccgggcgatagagctcttcccggacctacccctagctcgtcagggtctccagaagctatatacagatagggaagaatgggaaaagttggttcagatgctacagggtatggcgatatcggcggtagaaaggtgggtcggcgatcgaagacaagcccgggcaagccgctgatgttccagacaatctcggtactacagcaacgacgctgtggagctagccaaacatctgcagaagctgttggaggtcagagagaagcaggagatccctaaagaggcgagtctctcgggtcgccgtcataccaacggaaatgcttaccccggcgtctcgttcaataggtccatcgtctgctagacctcttattaccctcatcaccgctgtacaacctcttgaaccagctcgatccgcccgatacttctgctgccaagacagaatcaggagcttcatcgtacacgccttggcaggtccctgtgttctccgctccaccaacgattcacgagcttccgctatcccaacctcttccctcatcatcccttacattctctgctccccctaaacctccatcacctatgccagccatcagtcagatgatccatcactcggatacgagcttggctctcctcttgacattgactctggagcaggaacacgacgagcgggaaaaggaggaaaaggaggtcgggatcaggaggaaacgattaggcgcgggaagcgagagtcaggttcgacgggcggttgcgagggagctgttatgcggttcgagggtcagtggaacgcggcttcatatgctcagccgtgtcaagctcattgctcggtgttcagatgccagaatattacgaggagatcttatcgcatcccgctactccggacgatgtccgccggtctgcggagagtcggttgctccggcattggtaccgcttcatgacatgtctgtcgaggtatgcaccatcagtcacacatcgtgtccgcgcgtccacaactaattcggggcatacccacgacacgcagaaatgctccagatgacaagccggccgaaataggagaatctaatcaattcccgcagaacctctttgatccacctactcgcatcgcggcggtcccgagcaaggaatcgatcagaagcaagatcgaagaattgatcaaggggatgatcctgctcaaggtggaagatgagagcgcttgggccacaaccctcgaatggacggatgtcgcttcgttaggtcagttgcttcgtcatcatcggcagagttctggccagtggtttggctgacgtaaagcttggggtccgcagacggatactcgctcggtttcttgcacgaatactcgctcctcttcccctcatcaccgtatacaaccctgattaccggctacctccgttacttcgaattgcccggacccaacgatgaggtagcagaaaaaattctcgccaagaaacgagaacgccgaaaagccaagaaggacagtgcaaaaaagggcaagaaggatgctgtgtctgacgcggaagtcaaggaagatgacatctccccagaggaggccttgaagacggaagagaacaagcggaaagagccatacaccgttctcattgtgagtatactcgaggcgataaactgctgtacgtggctgatcatatcgtgatatcagaacgggatcgatagcctaccaaaatccctgttcggccacaagattctgtgcgaagcttatctgcgggaaggagactatgctaacattatcgcgaccgcggagaaaggcaaaagcttgatcaaggcgctggatattgaaaccggtctcaaattccaggggtaagatgcttaactatattccagatgcctctagtagtatcgctgaagcttgctgctcgtcaggtcgaacactttcttggatgtcctattgggaaccgctttggttcactattacgcaccaaagcaccacccccgagctctcaaacttttgaacggagttcttgacaagcatccagattcggtgccctgttacattggccggggctacgtcttttctggagaacaacgctgggaagaggctcgggtcgaattcgaaaaggtcattcagttggaggagcaaaagcgaggctctggccccgttgctgaagcggccaaacccgaaggctctatctggtcagcgttcgagattgaagcgaaagaacagcaagggtggtgtatgatcaagcaaggtcgtctcgatgacgggaagatagtgttgagaggtgtcgcggaagtctttgacgctgacactgcgagaaacgaagagtcggctcgagtctggtggcggatcggtgttgcagattgggagaagggtggtcagtctacctttagctgtggtgctcgggatgtgaagctaacgattcatgccggacctgcaggtgacagccgagattctgcttttgaatctttcgttgcgtctctgcgacactttgacaatttcgctccatcctatactgcaatgggagtgtggtacctcgatcacgcaaacccccctgatgaggagcgagcttcaaaatgctttcagaaggccttcgaacttgatgctacccagggagatgcagcccgaagacttgcggaaggttatgccaaggatgcggagtgggccctggtcaatgtgatatccaagcgagtgatggaaggtgaaggtggcctcgagggagggttgtccggagcctcttcgggacctgctgccaaattcctgcctaccaacgcttgggcttggaaggcctcaggagccgtccagatggtgagccgtcctttgttccagtaaaggctactgattgctgaaattttacgcgagcaggaatataaaaagtacgatctggcagctcaggcatttcaggtagcgctgcgttccggaccagaagaccctatcttgtgggctcgcctgggagaagcgtatgccaaaggtggcaaacaggttgccagtctcaaggcactgcatcacgcgcttgaacttgctccggaaatgtggatgtgctactaccacatcggaaatgtgcatcagcaactcgggacctacggacaggctgtctcggcgtacgagcggatcctcgaacatagaccgacagaggccggagtcgtccttgctctcagtgaagcatggttggcattaggcagatcagagagctctctgggtctgcggggacgcgcttatacctcttcactacatgctattgagcaagtggcgaccatcataccgtcgacgggactctaccgccgaattacctggaagcttttcgccgatgcatgcttgaccatcgtatcttgcgtcagcgatgaagacaacttgtcccaggctcacgctgcgatccaaccaatccttcaacacctggtaacggtggacactgataagaaggcagtcgtccccggtgtggtcaacgccgcttcgctgctgaacatgtcgtcatttggccgggacgacatgctgaaagtcgccattgctgctttcgcctaccgtgcagacctgctcaagtacgacacaaagattgccgagttgccgctttatgatctggcgcgcgctttgcatctgtttgcgaccgagttgagcgcaatcaacccaaagcatgagcagatcgccgcatgccagaaggccgcaatcatcgccatcagaaatgctctcgagaccgattcagcaagtccgacattgtggaacgctttcggaatcatctcagcatcggcaagtgcgcagttggctcaacatgcttatgtaatctccctgcagttggaacccaaggtgcggtctagcaggcaaaacctggccgggaggatattcttctgacattcttttgcacctcaatgtagaacgcacaagtatggtgcaactacggatacctatgcctcagtgaaaacgatcacgatctcgccaaccgggccttcaataaagctcaaatcatcgagcccgagaacgcttgggcttggcttgggcaggcaatggtggcttaccgtgacaatgatgccaaggaggctctctctctgttcgaacaagccagcgtcttgtcagcgagtaacctggtacgtctcccttgttcggaatgtcgatcgtctccgcatcctcagtgtctttcctctcgctcttgatagctgccaagcggattgggctatgcagctctgctctttgcgccctcggtcacaaatgccacgacactggacaattctctgctacacgaaccttccttcgcactttctcgctattgtgaagacaggccatacgatacgtcggcgctcctcctgcatgcgctcatcttggaaagactcggattagtcgaaccagcaatccgtcgggtccggcaagcagtcacggtactggaatcacggtacgagaccgatgaatcacccgaggtggaacgacaatacgtggtggcgcttgtcaacctcggtcggctccagttggccaacagcgagaacgaagccgctgctgccacatcggctgactgcattggtctctgcggggaccgaacagacgacgagggcacggcgattctagtgcagtgtcaccttgtgactgctttgtctcagtcgaattgcgagcaggccgatgaagcgctggaatctttccaaaaaagtctagaatatgcggagaagctctcgatcaccgaaaagcgagaagtttgcaaggagaaaatctccgtcttactggcgaggacattgtggcacttcggagtggaggaagcgaaagaggcagcgaagaccaacctgcttgaagcgtgagttcggcaatctggagcgagggcttgggcagtcttgctgaaccttctcgcatcaatccacagattctcttcggaaaaccacacaatcgaggccatgactgctttggcatcgcttggcgtcttgaccgaggatgaaggtgttgttgaagctgtcctcgccgagattgacgaccgagggatcgatcagccggatccagagggatcgctggcgtaccttcgatcgctcgtcaaattagccaatgtgagtattagaatggtatctattctacgattggcggctgatgtctatcccgacccagaacgacattgtcggcgcgaaacgggcattgtctgcagcggtacatctcaacgcgaccgacgtcaagagcaagctgcgattagggaacttcggccttgccttcgatgatgcggccaccgtgattggcttaacaaggggtttgcttgaattgaagcaaaatctgtctgtcgaagacaccgcagcgactctacgcctggagtcgatagccaaacaaaagaagggcgatgaggcggccatccgcttggcacagaaggctgtcaaattggagccatggaaccgcgagaactggacagccgcagcgctgtgtatctcttcaagagaagaggcaggggcagaaggctcggactgagacgtatcttgtatgatgtacaagattggccatgattgtatacacaccgctatataataatatgatagattgggacaccagagaggtaagactcttcgacggtgagtatccggtgatgtcattgattggcggagatgtccgagagccattggtcatttgcatgggaccaggctggttgggtagaccatatacatagcataaaggagttctcagggatgcttctccgtctcgccccctcgctgagagccatatacttcagacaaagacctcagaatatccgcgcaatgagtgagtgcgactgagaatcgatcatactctcaagcaaggatgtcgcgtcaagacgaagtgtagctctcgaccgaagacaagactaatctgatgatgtcttgcccgtacctagccaactacatcgtgaaattcaagaaagatgcctctgccgaagacgtagagaagttctacgacgagatctccaagcagggtcagtgtccgcagaccgtccgtcattagtttgttcagggctgaggtttgctgttgggatgagtacaggcggcgatatcaagaagaaagagcatggttcaaagtgtgagtcatccttcgatatgactacctatgcaataagataggaggcctgactatccttgatatctagtcttgcctcacgctgtagtcgagctgcctaagtcattcgcctccgaccctgactcgctcgctgctaagcacgacgttgtgcaatatgttggtcagtcacaatctcgccgccatctggtcaaatgagcaggactgactctccccgcctacttgcctacagagcccgatggtgaggtcaagactcagtagagagtagatcagaacctgttgcgtaattgtagtgagaatgcagatgactatcatatgattgacgattgcttgtgaagcttaaggattactggcgtgtcgggaacatgtcagcaagtaccggttgaatccagatctttgtccttggctagatagcaacatgctgcgatccgactttcttaagtattgtatgtctccctgcgcttcgcgccggacgagcccatagttcctgctgataagtatacaactatctatcgtcgaattataacaagatactacttgaaggggttattgagctggctgggtgagcctttattcacaccgctcggacttgatgtattatttgttgtgctcagacttaaaggcctgaggttggcgaacttcggatcaggcttggtaggcttgggctgctgccaactagcgatcttcgagccgaagaaggacccgattcctccgatggtagatcggacatcgggtagagatgacgccgttggagctgttacaggtgtcgtattgtccgggcttgcttgttcttccctttcgcggagtcgatttgtgacctctgatcgtactccgtcgaaggcacgaaacaggctagacgaaccagccgcgagagctgagcctattgcttctttcgttggacctaactgatccggtatgtggagatcatagagcccctctaagacaagcgcgtatcagaaatgaagacaagaccgggccaatcagatggtcagctcaccagttagccggataccgatgtctgagatggcattcgctttgccctcgcaagggtgtctgatggccagaagatgagcttctggtccttcaagcgtcgtcattccgactaaccttggttcacaaatgtcaaacaaaagctcgtccgtcgacttgtaccaggtcttgcaagcgctagtctccttcaaggccgccagccacttctctgaaaatggggcggatacgttcgatgggagttctttacgaggtccaagacttcagcataccttccccgcatgctccactgtaagtatatactcacctcctggcataggtattgacgtccttccgcttgcaatgtagtctgcatatttcatcgtcgaaagtgcactgcagatgtactcttcaaacttgctcctgagatcatcgtcgcttcccctaaatctgcatagggggtcagtcttctagcccttctagatggaacccgatcgaactcacgacatgcccattggcctggttggatcgctctgttggaggcacccgttgtccttccgttagcagccttatacagctcacagcgaactcgcgttgctcacagcattccaagtttcctcgacgctcttcacaacttggtccatccacactctatcgctgggtgtaagactgacgagcttttcaagttccttgtcatggaattcaaaggtattctgatcgatctgtagaaatcggttagcatgagaatggcgaaatatggaaagccatcgcgcttacattgattaacagatcccactggcaatccctctgctgagtgacgatgctgtttgtggttccgatcaaccacgaacctgccgtgagcatatcgatctgttgcagcggtaagtatggctggaagaaggcgttctgcaaagacaccccgggacgtgatcagctcagctcggcctcttcttccacggccaggttgctcacggccccaaaagtatgtaaaggtaagcccatataccgcaagagactgtttcgatcgcttgtccgcagagaagtcggccgcttggctttctctgatcgaaagtccaggtctggccctccggcgtcggacaggttcatcaggaggcctgcaagatgaatgtcagtatgtctccttagaccgatacttgggtaccacttcgcgtgacgctgacttacctggcattagagagatcaaggagtactgatatgtgcataaccgttcgaccgggtagccgtacaacatgatctgcggagcggatgatgcgacattcagacgtttccgagagacgccacacggagacgagaacttactcgcttctgtaacatcaacagcttgacaatcgtgagcgttcgatgccggaacttgtgtaacaattccctcaggctcgtgcctaaatttgagccacagttagtgccgtacttccgttccgaaaaagtactcgtgctgtattacggacttaccgatatacatgctcgactcattgcctttatctcgcagactgatctcgatgctgctgtaaaactgcggcaacaactccgtactggagaagtccctgttgatgggtcaaggtcttcgagttagctcggcaagtaaggaaggcgttcctttaaacgaaatgacggacctctgtgcgaagaaagctcgagtcacgacgcccagcttgtccctgtcaacgagctttccttttcagtaggttattgcagcagcaatctgcaatgggcataccttaggggtccctaagtatcgtaaattgatcagctcgctgctaaatccgtgaccgacgacagggccgacgatactcacaaacactggtcgggaagcaagaacgacgaccgccttctgcactgtactccgtgtcacatcttcccctttgacgagcagatcggcagccaagatttgtcgattgcacctattcggccacggcgtctgtcagtctaggttggaccgctatcgataactatgcgcgtcggataccgacgaaatcccaaaaatggtttggttctgaggtagcccgtcttcctcctcgtgatctaacacttcagctccgtcttctgctgtagacgattgaggagttggagcgtacacgcaatgctgtgtgattcatccggtccacaatggagtaagagcttgtagagagggctaaaagtttcggtccggcttacaaaatacgaataatcttcctcgctctttcagttccgaggcagagggtttcagcaattatcgacggctcgcaacggggcacgtctatccatcacttacgagatgagcaccatctggcaatgccaagaacggcaatagccggttcagctcttcgtcccgttccagagcccgtgtgagagcaggagggtagctccattctaccgtcggtccgacctataaaagactgtccctcaatcagctcgctctgaatcgcctcaatgagactggcagtagactcgccaaatgattgaaatccacgactgcgaggccgaggacgatctcggctttaggctgccatgaataggtgagcggtccgtccaagcctggcgagctcaagggagtgtctgcctgggaatctcctgcagcgggaggtgctaatctgacctgagcgttcttcttgggcgtctctagcgttcttaacgcagacgtccggggtgcgttgaatgggttcgcggcagatggtgggtaagtagtcccgctgcctgattcccagggagacgattccggatcttcaggcagatccacctgcccaaccgcagggaatttaggagataatgaaggttcgtggtaggagaggcggttcgtcgacacttcctcgagctctttcgccggcgatcctggtccccatgggttatcgtcgttcatcgtattcctgtcggctagatgattattactataatgatagggtatttgacgaggttttgagggttgcttgagcgttccagacgagtgcaaaggtttccgagcggctcagacaacctagctatgatcctgaattgtcgactggagcacctggacctggtatacatctcatacaccaaggatgacctcttctttccatcgaagcgatcgagcgtcacctcgtcatcggaatcaaatatttacttccgttatatctcgaaacgccgaggtacaaccactcccacagccgcctatcgatcgaacgctacgagaggcataatggtgcagggtctgtttgcgagagtcaagagctgcgttgaaatcgggtcaagatcaacatacatctgtagcccaataaccattttgtatgctacatcgatcatccaacgtgaagcccgcggatctctgaatacatgtcacgctctacagaacaacgtcctcgtccctgaaccacctatactactattatgaatagaacaatcctctatctctctagtttcgaagcaaggcggcttgtcgaatctcattgagatcgatgttcgacttttcacacatctcggcaaaggctcctccctggaggaataggttctcaggggtatcaaattcggcgatctctccggccgacattacgaggactcggtcgtagtaaaggatcgttctcagtcgatctgtttggtcgagaagatgagtcaacctttggatcgccgatttgtgggagcggatgtacgagtactcacgagcaatgcacaacaacgtcttgtccttgaattcgtgtctgatggtctgctggatcttggcatcggtagcgagatcgacggcctacaaaaaagtagcaatgtcagcggacgaacggcgacggatccgaatgcgaatgagggcggacacttacagcggtggcttcatccaagacgacgatcttggcatcccgaacaagggctcgggccagactgacaagactcctctctccggccgagaaattgctaccatcttcatcgacctgggtatccagagtgaatcgcgagacgggcgtaggggctgaatcgggcgacgttttaccgtcgagcgtcatgctcttcctgatcgcgagctcgctcgtatgagcgtcgaccaagtgagcccttcgaagagcgtcccagagctcagcgtcagtctgcaatgcgcaagatggaatcaacttggtattccttcacagcaatcagacgatcaaacagaggtattactaaccttttcgccgaaaggatcgatattcgagcggatagttccactgaacaagacggcttcttgcgggatgatggacagcgctcctcgcagatcagatagccccagggtcgagatatccactgcaatcaatggagaaagtcagcgtgagatcatgctgtcggtcgctcaaaaccacttacgaccgtcgatcttgatggatccggaacgaagctcgaccagcctgtacagagtgctcataatcgtactcttgcccgcaccggtccttccgacgacggcaatcttttcggcgttaccgatgtccaaagtcaaatccttgagcaccgcaggcagctcgggacggtaacccatggtgacgtgatcaaaggtgatcttgccttgagaaggccagctggaaggaggcttcaagtcaggaatatcgtgagcagcttcctgatccaggtcgtgggtatattccaggacacgctcggcagaagccatatcgttgatgacctcggcgacctgtctacacaaccaggagaacgattgctggacagtgatcatgtaggacaggatcaatcctccttgtgccggcgagatcctatccgagccaactacgacgataattccgacgatgaacgtcaaggtactacccaggaagtcgagtcggatagccaaccatcgctgattgacaacggtcaggtagtaagcccggttctcaatcgacatgtaacggcagttgtcatcgacgaatcgcttcgaggcgtcgaaacttcgaatgacagcgactccagccagggattccgaaaagtgcgcgtagagaggacttcgcaagacaccgtcgatacgcttgaaagccagggcactcttctggtaccaccacgcgagttggaagtagagcgtgaagacacccagaacggcgatgaggaagtagggctcaacaatggcgatcaggacgatagctccgataatgctggctccggtggtaatggccattcgcattgcgtctccgagcgtgttgtccagggtgtcgatgtccttggtaagtcgattgagaatacgtccgagaggcgtagtgtcgtaccacgagctcggggcgtgcatgatcctagtgatcattccgtcatgcagagcaacactagctcggaagaccgctagagcttgaacgactcccatcaagaagagggaaaaggctgagccgagaccgagcaggacatagagaccctcgtaaaaggcataggatcggttgaactggtcttcttgccagtaaacgagccagtacgaggtgatgatcgtcaaagcttgcgagacagtgacggccagcaggagtagcggtacggtaacccaaccgttggcagccttgagccatccaccgtaggtcttggaacccatgtttccggtgtgaacgacctcagtagacatcaaagtactaccaagacttgccgtcatcctctccctgggaagagagactcgtccgggggccgcttcttcgatagcttcctgttctacttcctcattgacctcttcggtgatttccttcttttcgtcgttggcgaattcgcgcatcaattgagcgaaagcgccattggcggtcttgagctcttcgtagcttccacgctcggcgatttcaccatcatgcatggtgatgatgtagtcgcaggccggaaccaggtggatagcgtgcgtgaccaagattcgggtaccgctcatgttggcgatcgcctcgaacagcaaggatgcgataccagggtcgactgtcggacaggtgtgaattgatcaatacatgttcggaatcgctcgagcaaaagcacaacttaccggcagcaagagggtcatcgaatgcggtgatatcagcttgatggtagatagcacgggcaatgttgactcgagctttttgacctccggaaaggttgacacccttctctccgatcgtctcggcatcaccgttgggcaacaagtccagatcggtctcaagacaagcctggtgaataacgtcccagtatcgttcctcgtcgaagggtcgtccaaagaggatgttttctcgcacagtggcattgcaaatccaaggcacttgagaacacgaagccgagctacctccaaacatgaccttgccctccgtacgtctcatctctccgaaaagcgcgctgagcagggaactctttccggaaccaatttctccgacgacggcgatgaaacagttcctagggatttcgaggttgacgtccttgagcttgaatactcgctcaacagcctcgacctcgccgtccgcctctgccttggcatcgccagtaagaccgggctgggcggctgtctcgccgccagcagcctccgcaatgccaggttttccagcagcaatctcgacgtgcatctgctgagcgacctcgaccttgccagtcttcctgtttttgatccatcggaaaggcttcttggcgttattcccgaaacgctgacgctttccaggttgaccgttcttgcctgccccgcctccgaagcctcccttcttggccttggggtcctcgggaacgggcttctcggacgaatcccaagtaaaggtcgcagattcgatcttgacagcgtaatcagagttctcgtcgacaatcctatcaatcggaagaacgagagtgtcagacgaggtcgtcgcgtcgagacgcaaagggaaaaatttacctagtctctgcaaacacttcggccatgaaaacgcttgacaacctgcccaacgcgttgtacgcatcggtgatagcactcaacgtcatcgggtagatcatcaagggcattcgcagaagctggaagagagtcaggaccgtgaacaatgtggcagggtccaagtctcctccggtcgaggcgtaggtgacgaaagacaagatggccgcgatgacggggactgtgcggaaggtttggtgatcagccgtcgtccacagagaaggagccgtgagatccagcgacgacttactgctcatggcaatggccatgttggcactcctggtaaccatcaactttctgatatacttcaattcgttctgcctgattccgtctagtcgcttgaggaacggtttctcccaggccatgagcttgacaaccttcatgccgctcaagagctcttgcaggagcctggctcgcttgtcagtccagatcatggcctttttgcggatcacgaaaaggtgcttgatgatggaagtctgtccgggtgataggatgaggaggaaagctgcgagcaggacaacgcgtcagatgggcatgttgacagtggggatagcacacgatacgtaccgataccgacgagcgcgctggctttgatctgtacgagcaggatgacgacgaccacgacgaattggactaggaaatgactctgtcagcgaagcgaccccgcaacgaaccaaaactcgactagactcgacttactcggcgccgtccagaccatgtggaacattcccgccgcgaaatcgatacgcgaaatatcggtactaatatggttgacgagctttccgttggggtgttgaatcctggacctgttggtcaagttgatggcccctgttcgattgatattcatcagatcccggactgcgggacatcacattcacaatccttcgggactcacgttcataaagcgccgaaatcaatgccgccctcgccaaaacaccagtaccggccgaccgcatgaaaaaatggttgatgctcaatgtggcaaggatcaagaggcagaacaacccgatacacatcccgacccctcgcccgacgttgggaagggcggtgccgttgttccgtgaattgttgtaatcggttgagaattgaatgatggccttgaccaagagcgaggtcatgacctgagccaaatcaccgaggacctgtgaacgagcgagtgaacaaattcggtcaggctctgctcgacgaatgaacgctcatctcgtgtgcggacccaccttgataaaacccgcggaccaaaagtaccatccaaagacatccgtgagcgcccaggcgaggttgggcgttttcctccccgtccgagccttccaatcctcttccttttcctttctcgtcttgcccttttcctctcccctgcccagggcccacttcatgcgtttcttgaacggaggcttgatttcccccttttcgagcttgatgttatactcgtcggcgtcgttccaccgttgctggaaattggcctgcaactttctcgagagcgcgtcggcttcccgctctggtggcagacggtacagatcctcgggtgccaactgtctcgccgccccgagggccatgatgttggtgatccaggagaaagtgatgagggagaagatgttggccttggcatccggcatgggtttagcgtcgtccaacgagtcgggtggaggtgggggtggatgcttggatttgtctctgcctctctccccaacccaccaccatcctcgtcgtcgtcgtcgtcgtcgtcgtggacgacattcaactaatcaaccactcaaacaacattgctattcctccgatctcgaccccggcaagactcttctttcttcgtctctttctgttccccccttctctacaaaaaaagaagaaaaaaaagctacagacaagatgcactccgtcctccgcacttccctcaagaccgccgcccgtggtgtcgccgtcacctcggtacgtccacccatctctcttttcgcctcgcccagccgtcaacatgggaggagggagcgagggaggaacgagaagccggtcgtcctagccagaccagtcgagcacggttcgatcgagaggggtcataccgcaagtcatggatgacacgtacggttcatccaggatcgatcgcacggctggctggctggcacggacgtctcctctctttacctctcctcctcttcccatcgacgatgccccttgggccactcttgtaacatcatcgggacacgatcagctgacctccgatctcgctctcattctcgacctcatcaggcccgcactgccgttgcccgtggtgccgccatcgccgctaccaggacttacgctaccgccaagcctggtaagcccgccttcatgccacgtcctctatccccccatctgctcgtgctgatcagaaaccatgcccatgcccatcgcagccgcctccgaggtctcttccatcctcgagggcaggatctcgggtgcctccaccggtggtgagctcgaggagaccggtcgtgtcttgagtgagtctttgcgccacacgtccgcatatcgacacgaatgggaccccgtgactgaccgagggatcacatcacgcgcgcgtctctagctatcggagacggtatcgcccgtgtctacggtttgaggaacgttcagggtgagtggcaaagcgagacgcccgtcccgctctctacgtttggccttgaagcgccccggactgacgtgaatctcccccctactcgaccccgcttgcagccgaggagatggttgaattcgcctcgggtgttcagggtatggccttgaacttggaggccgacaacgtcggtgtcaccatctttggttccgacagggccatcaaggagggtgactcggtcaagcgtaccggtaccattgtcgacgttcccgtcggtatggagctcttgggacgtgtcgtcgacgcgctcggtaaccctatcgacggaaagggtcccctcaacactaccgagaggcgacgagcccagtccaaggcccccggtatcttgccccgacgatccgtccacgagcccatgttgaccggtctcaagtcggtcgactcgatggtccccatcggccgtggtcagcgagagttgatcatcggtgaccgacagaccggaaagaccgccgtcgccctcgacaccatcctcaaccaaaagaggttcaacaactcttcggacgagtccaagaagttgtactgtgtctacgtcgccgtcggacagaagaggtccaccgtcgcccagctcgtccagaccttggaggagaacgacgccatgaagtactcgatcgtcgtcgccgctaccgcttccgaccccgctcccttgcagtacttggcccccttctcgggtgccgccatgggagagtacttccgtgacaacggaaagcacgccttgatcatctttgacgacttgtccaagcaggccgtcgcttaccgacagatgtccttgttgttgcgtcgacgtgagtgctttgccgtggatatcctcccatgcctcggggaccaccagctgaccctcgtgccctcgcagcccccggtcgtgaggcttaccccggtgacgtcttctacttgcactctcgtttgctcgagcgtgccgccaagatgaacgagaagctcggaggtggatccttgaccgccctccccgtcatcgagacccagggaggagacgtctcggcctacattcccaccaacgtcatttccatcactgacggacagatcttcttggagtccgagctcttcttcaagggtgtccgacctgccatcaacgtcggtctttccgtctcccgagtcggttccgccgcccagaccaaggtcatgaaggccgtcgccggttccttgaagttgtacttggcccagtaccgagaggtcgccgcgttcgcttcgttcggttccgacttggaccaggctaccaggtacttgttggcccgaggtcagcgactcaccgagttgttgaagcagcgtcaatactctcccatcgccactggtacgtcggagacgaattgatccggcccgacttccgtgccccgtgccctcgactgacgctcgtgacccatttcttttcccgaccctgcacagaggtccaggttcccctcatcatggccggtgtccagggtctcttggacaagatccccgtcgacaggatcgtcgagtgggacgccaagttccaggctcacttgcaggccaacgagcaggacttgctcagcgagatctccaagggagtaatgaccaaggagctcgagcccaagagtgagtgtgccgacgcctcgacgatgacaattcgtcatgcttgcggtgtcactgacggaaccgatctctctttttgcgcccctcgcagtcaaatccaccatcgagaagttcaacgagagcttcttggcttaaaatcgtatcgacactctggagagaacctatgtgtagttagatgaaaatgatgcgatgaattttgaaatcaatcggttggcgagagagcgtccaggtgcgggtgggtggatgggcatcgtgaaaggaggcttcacagcgagcctcgcttgtcaggtgtgcagagtctgttggtcgatgtgcctaccgtgggggttcctcggcttgtgccgtttcgaccggatgtcgcgacgagatgaacgattggatgtagggcggacgagatcacgaaccggcatctttcggtacctttactgcataccttttgcgatgtacagactcggctttccttctccatagctcagtctcggttcatgtgacgagctcgaatatgcatgatcacgatctttgtcacggccatgtgtggcgagccctatcagaccaggcagacgttcaacgagccttttccaccatgtttcgtaaccgatatctgaaacgacgcttcctatgcatatccgatatatcctaacgtcatggtggcttgctgagagaaaaaaggtagacgacgttcacgtttcgcgacttgtgctggtctgaagggtcacgcgtcgatattagcgagctgtttggccacgtcacgatcgacgagaccgggtcccgcgcgtatcaaacaaacttgaaattccgcgaaatcccgaattctaaaaacgcataacacacgaaccgagttgactagaatcgcataacgcgtcacgcgcacacacacacacacacacacacacacagaggtccgggttcccgtacaatcacacacagcgttcacaggatataaggatcatcatctcgacttcgatcatccatctcaccattctctttctcttctcttttcatcacaaacacaatctcgagtactcactcacccactactcccctcaccccttacaacccccccaacaacaactctaaacaacatgtccggtcgtggtaaaggtggaaagggtgagcaactcgtcaatctcgactcgatcgctttgcctcccttactcatcatcgtctttcgttcttcgcctttcgtctttcaggtctcggcaagggtggtgccaagcgtcacaggaaggtgctccgtgacaacatccagggaatcaccaagcccgctatccgacgtctcgctcgtcgaggtggtgtcaagcgtatctctggattgatctacgaggagacccgaggagtcctcaagaccttcctcgagggtaccatcagggacgccgttacctacactgagcacgctagtgagtattgcctcgaaaggtcgacatactcttatgatcacccgaatctgaccgcctgtttgtgcccttaccttctaccagagcgaaagaccgtcacttccctcgacgtcgtttacgccctcaagaggcagggaaggactctttacggtttcggaaactaaaccggtcatccctttcacccacccacttcataacattttcgcctcttcgttcgcttcactttggcttgaacaaccgacaacattcacattccgacattcgatcttcgctctcaatcatggcacccgcctgatttcttctcggtccttcgtccgatcctcagacaaggattcacgtgcacatcggtacctttgcctggccagcaaggtgtcgaggatccatctgagcttgggacacggctcgagatcaggactcggcgggctttagcctgtatacttgaactctttgtgttcgacgctgtcttcccttgtatccaattagcaatatttgcatacgtgctcgcgtcgactacattctactgtccatcattcgccacccgtcgtgtgtcttccattacaactttcctctctcacaaagtcttgccttcgggcgccttggaccaataccgatcgatcgctttggcttcgatcgtcgacatgcacatctcgtgaacgaccatgtcataccgtccttgcctcggcacctgcccctcgcacacgttgcctcccatggccacgttcagcaagatgttccagtcctcgagcggcctcaacccttgtggcaacgtcgcccgcatgactggtcggccgtccactacccagaccaactttttggccggcgcatcccagtagaaatcaaaccggaccgatccgtccttcatccccctcgccatcgtcttgacggaccgatgcttgtgcgcatcttcccccgtataaaacccccaatggaggcaagaatggttctcccccgatccgttccaagtctcggcaatgtccacctcgccctcgcccggccaggtgaagggttcggaggggagcaaccaaaaggccggccagatccccgtcgcactcggtagcgtcagggtagctgacaagcgacctcgaggatgagttaggcgggttctgctgacgagcctagagctcgtcggcgtcgaatcgccatctccgggctggatcgctctcaggatcaacttgccgtccggtgtactttttcagattcgtcattcccatctatcagcttcagaacgcatcagaaccagtgtcgtcggtccgcacacacatactagaacgaattgtccgggttggcggtatagttctgtagctcattgttcccccatccattgtcaccgtgtccgagtttgtgatcccattcttgcgagacgggatgggaaggatcaaacaccggtcgccaaaacgtcgtttcagacgggttgtcaagcgacccgctcggcccgctcgaagaagagttgagacgtcgtatcaaattccggaatgacatcgtagagacgtctaggtggatatgcgttcagttgtacggtgttctgctgtcaatgcgacatgattgactaatctgaaattaggggagggttgtgcgtctttgtaaataacgcccaggtacttccacagcgagcgacaggcgacaggacctccaccggacatgaaacgagggccaaacgaatgaaaatgctgccaatatgtcaagtgtacaacgaggtcgatttcgtaacaggaatcaggagtcgttcgtaatgccatgatatcgttgaccgtttcagatgactgtggtgatgggttgctgtgttgtttgagcagcttgaggtagattgccaaagagctgatatgacggcggagcaagatatgaataacgtgaacgacactcggcattactgcacttacgtctgcaaggctttgggctttagcaacaccggccttctgcaccacatattgatataacgcaggctttatcgaaggttgtttgtcgatgagttccttgagctgttcccgtggaagctgcatcaaagcaccgaaactggcaggtgctatcgctttgacgcagtgcataaacccgacccagagttgcgggaacgtccagatctttttggtgatgagtcgggacaacagtgtcgtagaaacatatcccactaggctcttgtatgtttgaacagaacgaatgacctggttgagacgagtgagaacgttagcatcatcttcaatctagctcgccaggtgaacttacggttcgcatgaagaggataggcaggttgacagagtcgatgattcgctgcataacgacagccatgacctctgaagggaagcggtccgtgagagtgaaacaaatatcgatcgctagggtaacaggggagaattcagatgagctatcgtcgcagtcttcagcttgactttctgcgattcaccttccttagcagccgagaccccaatcatcttctcctcttcgtgcaaaagtactagcagatctgcggcagaaagctcttctggtttacccttgggcaagtttgtcgaagcgcggatatccgagatcgggatgatgtttcggaagacggtcctgatcgtctcgcgcttttccgctgggttttcggaaaggatgctgaggatccgcggcaagaaacgatacaattcggcctggagtatgtggatgagcatctcaaggcaattctcatgccgtcaaatcaagcaccggggactcaccctatccatctgagaagcgatgggaatgaggaattgaggcgaaagctctcgctcctctgccaactccttgatgacagtcgcgagtgctggactcggtcgagccgtgtctgtaaagacgttgatgacatgcagagcaaatgcctcggattcgggaggaaagttgcgaagcgattccaacatcttgacgtgcttcgaaccgagcgatcggatgagaggggtagatatggccctcagggcttcttggacagactcttcgcattggggataggtcgtaaagattctgccaacatcgatgtatcagccgatcacgttccgaaaggcaaactcaaaggtcacccactcgtcaagcagtcgaggttctctgacgctcaaggcaaagagtaactctacgtattgctgaaccaattcctgatttgcaggctgcggcacctcctgaggcaggtaggtataggagcgttcgtccaagtcaggcttcgtctctggtgaatcacttggacgtttgagctttgcaaaagttgtcttggcgaacgccaaaaccatctcgctcatggccttcgattcgggaacccatcttttagcggtgttgattgcgatcagtcggatcttgcggtctgggaaacatcgacgacatgaaccggtcagaagccaagcagctgaaacgttgctttacagacaactcaccagcatgagttgtcatgtctagtaacaggcccattgcagcttctcgcagagggggtctcaacgtcacaatgtcccgcagcgttgagagtccaacggcagcactgtgtatgcaatcgtgttagctcttttcaagatgcagagccaagccagacgcaaattacctttgggtctgctcgcaaagtccccgcagaatttctaaaatatccttgggtacggctggcagatcgatcaggaacgaactaagggaattatcggagctgtcgccatcctcaatcttttccaggtatcgggataatagcacctttagccatttggcgtatgtggacccagcagtctattccgaagttgagtcagactactggtcggtagctactctgagagacggccagactaaccgaatcgggtggggagacctgctcgctgtaccattcctcattcaaccagactcttgctaatttcgatctgtaagggatctcgagagtcagcgaacttcaagcagatccctagagtcagtcaagcttacctggacgcaaagtcttccatgacatattcgcaaagagccttccgcacccaatcatcgtcggaaaggtcggaattgtcgtgcgactcccccttaatcgagctcttcggttcacttgaacgactggccatccttgcgagcaagaggacccacatctccttgggcgagatcataggaccggcaagaccctgtgtagcctcgctatcctcgtcaagcatccgaacgtctgactcgtcggccatctgttgttggacatcgcctccagtcttgcatatccgtcgcattacttgcagtaccatttcttgtcgacccttgtcgtccaaactttccacctctggcagactgaaatcgatgaaacgcatcggtaacgcctcttctaccgtcccgtccgctgccggtagctcgtccggtatcacaatatccggaacgccctctggttcgtcatcctccacgaccatgttcaacgggtcttgagcgggaccctcttccagcttgacgccgttgtggcgatcggcgctcatgatagcggctgaaggaatggcagagtcctcgtcaagcggatcgagtagcatgtcatcgggttcgtcctcctgaagccgtgatggcaacgccaaggtcgagttctgcactgctaccggtgccacttgggtcgactgattaagtggaacggacgaagaggatgcgccgagagatctcgccaaggccagatagtgcggcgcatcggtgctccgcagcctgtggcgactttgctgtgaagtcaaacggagattgtcggccggctttcgagaagggtcgaccgagaacacaagctcacctcgatcgcattacgaatcgcgctttcatccatagcattcaaggtcacgaacagcagctccagcatgacgtcgaatcccaatgtcgtgacatctatatccgggccgagcccctcaccaggtccacccacagccagattggcggcatcggcctcgatcttctggcgtttcgttgcagagggttgaccgtccgtgaccgcctccccaatctgatcgtgctctcgcttgacgttggccgacgctgtcggcgcctggactcgacgagccgcggcttcataccgtgcagccttttcagccttgagcgcagcacttgttctggcgttctgcttggtcaaggcatcattcagctgtgcaccgaacgcatgaaacatgccagtcctatgatgtgtgatcgaatgtcatcgacattagctgaagccgtttgagaaaaaagtgcctgtcagaaacacacctgaggaggtgcactatggtgactttgagcgccttttcgaccgatcgtatttggctggcggatcgaccggccgcttgcatcgctgttggtgtccagcctgtcagagaagggatcaagttggtggccagagcgggcctcgctttgagaagaggggggatgaggttcaggataggctgaaggaccgacatctcgctgtaaagagtcacgatacgagtttcagtgcaaaacacgacagagatcgggtttcaggctgatactaacgtgtcattgacgagagcctggctgatctgacccaacaattgattcgtctcgttcatcaagtccgtcgtctttatgaaggggtgcatcgagggaacgagattgagattgggatcgtctttattttgcagttgaagctgatatcagggcatcgtgtaagcgaacacacaaatgtgtacggtccgagcacgggcatgactactcactctgggatcggcacttccccctcgagtcgctaccagaagagaccgctgaataaacttccacgccgatgagcggacccccacattaactgttttgggttgtccaagagtcgctggctcgatggatatggcgagagcgaatgacagcatctgatgcttggcggcggtcaagagctgccattggtcctcacgaggaggtcgcgcaagacacctggtcgtgcaaatgacacaacaagtcgtgagccggcgccgaaagagtaaataccgcagaactccgttactcacaaagacctgaacaagagaggatacatgcagctcaaacattgtactgccagcttgactatagcgggggacgagtcttgcagtagctggaccatatctgacaagactgtgccggcgactgcaaaaacagggacaaatgtatgtagtcaggctcttgcagcataaaatcgacagccgcaagctacaatcgatccttataaccacaaaaactacatgctggctatacaagaagatcgtagctgaagctctgggacgtactggttgtcttgacctctatcgacaagctgctccgtcccaaaccaaacgcaatgctgctcaatacccatcgcttcagagccgtgtccccggtgttcttgatggcttcaaagagaggcagacagaattgggtgaccccctctggacgtttgtcgagtagttccgagaccaccagcagcgcttcggcctgctcctttgattctgccggctttgctaacgctacggtgagcgcctggtaggggtcctggtcgggtgcattatcggaatagagcgacatgatacccaaccatgtaccagacaagctatctctaacaatatggtgtgggtggtctcggcgatggcaagctagacgaatgtaacgtgtgtcggatgccaaaaatttctcggtgagcagctagctcaacatgtgaggtcgctcggggatgatcgaagctgaggggggaatagcgaggtagtcatcctatgttgcatggcaatctaaggggttgcaacggcgacgcgatgtctcgatatgatgagcatccgcggtgcagacaaattccccgcggtacatcatcatccatcccatctcagctcggtcagactgagtatgacgagaccggcgtgctcatcatgcatcttgatcatgatcaatgggaagaataccattgaatgttggccgactagatccctccaagctctcacttgactcttgacgacctcgatctctgtactctgcatcacttgattagggaacacgaatctcgctacagatatggtgcgtgcgccgattcatggctcaaacggcgtgacgtgaagactgacatcgactgttgtcgtcaacccacatagacatcgtcccaaggaatccagaccctcttggaggcggagaaggaggcagccaaagtagtccagaaggctcgtcagtgtaagttgatctacaaaccatgtctcgctgttcaccgctacattggttagctgactgaccgttatcgtacctcacatgaacctgatctgaatgcaacctcgatgactggtctcatcacctgattctcaacaacaacatagaccgagtacagaagctcaaggacgctcgtgctgaagccgccaaggagatcgaggcttaccgatcccaaaaggagaaggagttcacctcgttcgagtccgaggtaagtttccttttcatctacaagttataattgcagcacgagccctccccactcacacgggcgcggtctgtttcacagcacaagtcccagaccaaggattcgcaagctacgatcgacaaggacaccgaaaagcaggtagagactctcaagaccgacgtcgagaagaaccgctctgccgtcatcgacaagatcctcgagcgtgtcatccagaacgaccctcagctgcatcagaacctgaccaaggtcgaggcttgagcgagcgggatgcggatatagacagatgtatgaggccaggacggtagggcaagaaggagatctttatcagggttgttcgaacggtctccccccgagtcgacctcacctttctgccgaactggccccgttgtacgccattttctttcctgtttcgaaatacttatccatcttcataccacaaaattcggccttcaggcggctgcgaggtctcacatctcctaatcgcgtttcttgtattgactggacacagcaatcgatcgttcacaaatactgatatcatgattatgcatcgacaaaaccaaactagaactataaggcttggggtgtactgcttgctcgtagatcgccgtagagctctcctatacatcgttccatatttaaagaagccaactctcgctggcagggcttcatcgactggctgcggctgccgtagcgaggaccgccataccggacataccgctgccgctgccgctctgattgtcagtcggcggtgacgattccgactttgatgcaggctcttcacgctcgccctctgatctgccttccgatttgactgaacagacttctccggcgcccaatcgacgtcgcttcggctcacggtccaaacccatatcttcgatcaactgtccgttggggacagttcgcgcatcgcctgtgccagtgctggtttggttgacacctgtagctggactgagagatcgcgcctggtccaaacgagaggtcgcggtattaggcgtgagtcctgcagaatggttgggacgaatgaaaagaagcgggtcgccagtgttatccagcaagtcaaaaagcttgcgaggtgtgatattcggcagacgctccggttccgagcggactgacgacaccgccggacgagcaggcggcaacagaacttcggatctggagctatccaagggcgatttggatgccttcatacgtctttcggtgaattcagattgactgataaacctggcctgcttgatcgcagggagttgcgttctttccgacctcccagagctatatccgaaaggcgcaggcggactttgccttgggattggccgtcgctggataccccacaccgcaaacagatcactccaccattgattgagcttcctctcggtctgttgctgggctgcagaagggctttgaccaggaggtaaagatgaagtggtatgtgtcatccagttggagactatatgcagagggaaaaacactgcggatcaaagctgatcagctcatatctaggttattgaggtacggtctcgaatcacaacgtactttgaggcgaatgccttccgatatccccgatggtatccaagatcacagccaagttgtcgaccgcttgcgattgccgtctagccgtgataccagcgtcagcgtctcctgatcgtgccgctgcggactgcaggtaaaactggctcgattcggccagtgagtgcgatagagcgaagcagaagccggtggctgacatccacgcaacaggcgaagccaatttgttaagactgttgacgaaattgggttcatcgaaacgcaattggggtggcaaggaatgcgcccagctctagaagtaggaggacacggatgagcgatcgagtcgatgcgcagctctgtgcagtaccggactgaccctcaaagattgttccaaggcagtcggtgaggtgtgtgcaggcttcccacttgaacaccgattggagagatccattatgctagagaaaacggacagctgcaagacataaagatgatatcagttcgcttgatacacatgatcctggctacggaaccaactcacgatcctgatgcaatggccgaattcgcctacatcgtgattcgcaatgggcgtcttcgttccgaaagtcgccctcggcttgttcgagccattacctccaaagcgatgccacgaggattcgcctccaggcagaggcgtcgaagctagctcagcgtcggtcaggcgcctgactcgaccgtccgccgaagctgacacgtctgccagatacaacatccacaaagtgcgcgcgcggcactcgacaagcgttgcagcctgttgctcttcattggcgacttcctcgtcaagcggtagctcgcctaactccggggatcgaggacgggccaattcgatggcgatatctagagtgtagcaggagaagcagccggtcgttagcctagagccgagacagcttggagagcggcacggactcggcttacccagatattgcccagacttgtaaggccttcccatactttgctcataaagtccaatcaggcagatggcttgaatcatttcagtgtcgagccaggtcaacttgtacccaggatcgcttcgacgtttgttgatcccttccatcaagttgtctccctttgcgattccagacgctctcaaccaggcgttcgcctcctgcttagcgcggctcgccaatacttcgcctcgcgcatgtgcggggaaatgagcgttggcctcggtgatcgagggtggcacaaatattgtgtgatgcatgaagcgcaccgcaaaggcatagatgatgtgcaagagagcggacgggacgcggtccaaataacgacggtagccaaaggtaggttggtggaacatgagctggtaaggatgcacccttgcgaagaattggtgacacatttcctcgaccaagacgttgtccgcgtcgatgcgctcaacgaccgaaagataccactcctcgtcccgctcacgcctcctgttgatctcttcggaccgcctttgcgatccgtcaggcggaccaccacgtcctccaccattcgcagccgctcctgcagacgaatctcggctaaaattcgagttgccagagcttccgcccgatccagagacgtgttgcgcattcgattgtccggtggtaagcccggaggacgtcacatggttacgcggtccgtccccgttcaggtcaaccccgagaccattgtacagggtgcttgggttgccggattgaccttgttcgacgccgtaagcctcggcgacctccttgtcccttgcgtccagccacaatgctcgatcgtccgcggcttctttatccgaggccctccttgcatcttgaagcatgtcataaagcctctgcgattctctctcgaccacccaggtcaagtcgatggaacgtcgaggcgtcgggtctggcccgcggggcgttgacccgtcatttcgatcggcatcatcgccagacgcctttttatcatcagaagaatctggcttgtcggcctgcatcgcgtcgcgagtccgaggcggagggatagcttctccggctgagttcaagtaggaacacacacgagaggagaattcactgcgagattgcacacgcagcgatcgttagattaggcaaggtgagacgaatagggcatcgatgggcccgctgacgtaccagttgctacaaggggcaaatccgtcgcatcgcctcttgttcttgtgacaggccgaacatgccttggccagtctcttcctcttgcgtcccttcgtggtcagctcgaggtggaaaggatgggtcgacggagaattgccagttcgagaagaaaagctggattggctgtctctagataccatatcgggacgtttcgcgccaaaaggataccccttgtaatcgccataagcttgatcggatggggtaagaggtcccctgagattggctgacgaagctgacaaacccgacaaacccgacatgtatcgtagcatgtcgggtcgtactggctgagaaccgttggaagcgtctgtagacgtgttgtgtctgttccaagaagaactttgagtgggagcggacgaggcagatggttcctgtcggtccctggctggaggcggagcgaaagaagactcgtcgagatggaacctaggatgggaggtcaacttcgtgatggactctcgtctctgaggcgatttagacgaggaagccacgacaggcgcagggttctgaccaaaggccaaagtgtccggaggactgtgagtctttatactattacggcggcgagagggacccccgacagcgtagttgatggcatcaggagcggattgctcgtgatattgatgatggccagggatggcccctgaaatctgacgaggcgttccagtgtttggattcgataggtccatcgtgtcagcgttgcttctagcttgagacgattgtcccggtaaagggagatcactcgtcgtcgtcatggcaggctgggaccgtgcggcggtggtggtggaagcgagaacgtttgcccgatcacttgttgtttcgggtcgatctaagttgatccggggatgaagggtgggttagagggagagagaggaggcgatgaagatgaaaaggcgtgatcgtcgtcagctttgaccccttgattatcggattgagagagagcaagctgaatagatcgcctcgaaagcggtccggtgccatcgcttcgagaggaatgacagggtttgtgcgtcctgacatggcctgacaactatgtgcgccctacacagcgatcaaaaccgcggtaacgaacgaccccgttttcttgttcgaagctcgggcctcagccccgtatgcagtggaaaccacccagaggaacgaaaccttatcgtataccgcagagatgacggcgaaagaagtggagggagggaacacgcccagcgcaaacgcacctctcggatagagatctccaggggttcggcttggaaaggaaaccaccctggcgttgtcttcgttgccgatatcgcgatcacgagtaaggtctgcctcgttttcaaaggaggtcgggtagaagccggatggatatagcaatcggggaaatgcgatcgaaaggagggtgcagcgtagaacgaaatcgaagggatcagtcaggtttcggcgagacaaaggggaaagaatcatcctgaaacgctttcaaactcaccctgactcggtcgtcgtcgttcatcattgcctcgtttatcatcctcgcctcgatctgaaccttcggcctgttgtcggtcgttcatgtcggagacggtctcggacggtgagcgagttgctcggttggctacccggtccggcccgtgtggatggagtggatggatttgatggatatctgtgcgattcacgttctcagtctgaggccatgcatgacgacgatgaagtggagcccgtagtgcagagactaaagagatcgcgacgtaccgaggtgattatgatcgaatgggtcgatccaccaaagatgtacacgaggtcgtgcgtcgacaccgaggaaagggcacaacaaccgaaaagagctggcacccagcagagcttccgacgaaacgtccgagatcccttccggtgactggactgtcccgatcgcacaaagaaggtcgaactggatctaacgcaaagcaccgaatacagcaggcacgacggatgtagagtcgaatctgccaagtctacagggcaagtattcaatagttgaaggataggtcacctacgagaaaaatcagctcgacccgaacgttgccgctcgaatcagaatatcatgcgtttgaaacgaaatctcgctggccgacacacatccgtcacggaggtcactgcaccgaatgaccaacctggattggccccctccttgccccgtttaaatcgattgcgggcggcgcagggggagccagtcgttgtcccgggccgtcgcactcagtaactgaaaagactggggaaccgcaagcgaacgcgaaaggggcaacacctcgcgtctacagccgagcggaatcgcgcgcacgagcggcaattgcggcaacggtagcggcgcggggagtcgccgccagggcaaaagtggagcgggaagatcgggaagtcaattaaccggggcttgttgcgaaattgccaatgtagatatttgcacggcaccgactgctcgatgaaagcgattacaactgctctgaatctgctggactgaccaaagccatcttgacctttgatcgctgcgtctgcttatccttttcgagcgagatgtcaacgacgacggtatcaaataccgagatgttgactttggttcctttgctgtttggtaccgcgagctgatattgctcggcatcataatcgtgcgaatctctgctgaacgtgattagcccctcgagcccgaggctggaaacgatcgacgccgatcagcgataccgtcgggtcacgttcagccgacggggaaactcacgttggaacaaagaccgccaatccgttcttgaacactctgatcacgaaagcatcctctctggttacgccgccatcgtcgcgacctgccctcttcccgcgggccttgagcgcgagaccgacgtaaaactctacactcgctcgacctgccatttgggcaagacgatgtctgcggttcactaccgacattgctcgttcaacatgggattttgagagcagcgagggatgaagtgtggtatatccgatggcagcagcaagttgtcgatgcgccaaaacgtcggcgtatcgtcggatgggagactgtaaaccgtagcagaaaaaattgtcagcacggcgatccgtgctccttagacacaaacgtacggtgaagtgggtgtaaatgggagtcgccaacccgtaatggccgaattgatccttggatacgcttcctgcgcaaaagtattcggcggcaagcatgcaacgagttgccataatcctgaccagagtattgaattcgggatgaccaggatcctgcaggacgcgcatccatgtcagtgtgagtattcccgtgtttcatgccgaataacccacgatgcatttatcaagcgagtcggcaagagctttcgaagaagacacgtcgagagaaagacccttgcgcttggccaagatgtcctgtagcgtttcaaagttggtctggggagggggcatgtgtcgactgcaatcgcgcaaggtcaaggatgttcagctagccattgtggagtccccttgcatcgtctggctgaccgtagaactgccgtttgaggatacgcttcctgtatccgtttggcgacactgatattggccaacagcatgaattcttcgaccaagctgttcgtctcaagcatagccttttgttccacgtcgatcggctcgggtgcaccctcgttcgaattgaggtggattttcaactcgggcgatgagagcgaaagagctccagctgctattcgcttctccttgagtttgatagcaagccgattcagcaaacgaatgccctgggtaagagggtcttgcagcgacctgtaacgacgttactttagcgagagctgaggcaaccgagactcaatccgttgaatgctcactggtcatccttgcggttctgagctgcctgatacgtgaacgcttccttcgaggcaatgaccgacttggtgaatcggacaccgacgatgtcaccatcaggcgtcaattcctgtagaggtccgaaacctagtcaatgcgttgcgctgggatcatatcaatgtgaaggcagcctacccagatagcggagaaagccaatcgttcgacgaacggtctcaacgagcaaaggttcgtaccaagaagactcggcaacatgtcgatacgcttgtcgacaaggtaaacggttgttcctctcgaagcagcctcggcgtccatcgggttgtcggcatgtacgaaatgcgacacgtcggcgatatctacagtcgaggaggaagtcagaaccctcacaatgtacgggccaagaaacgaagaaactcacggacaccagcctcgatgtttccgtttggtagctgtcgagcatgtaaagcgtcgtcgatatcttggcagcctatcgagctcgtgcgtgtcagcgcgaagcgataaatcagcgctcgtgatcttaaaagacgacgcaccaggcggatcaatgctgcaaatgagaagctctcgcagatcttctcggtcccgccaaatcaggttgccttcttctttcggagggacaacccagctttcgccttcaacaggcaggcagttcaggatggctcgtccaaagggcctgtatggcacctcgtactctagcaataggctctcctgttcggcctccttgctttcgaccttgcccagagccctcacgaagtgtccttccggataccgcgaatgaggaggccatgcatcgatggagatgagaaccttctggtcgagaagcgaaggagcctggcgagttctgagtctgattcgcggcagcttacgttccaaaggggtggcaaagactgtctgttgcgccagagacgtcgcatctttgcttgacaaggagctggcatccagatgacagacataactgtagaaggggaacgtcaggtttcaattgcaaccctgctgcccaagagagtgccatacgtacgctcgccaattacgtttgacaatccccacgacctttcctgtaggtctcttttcgaccgtgttctgctgcgccgtagcggcagccgtcttcctctcgatctctgcgaggcgagcttcactttgctgacccgcctctgtgtctccctcctcatcgtcagcatcgtcgtttttgagagcctctacaacggggaacagtaagcgtggccgttcatcgcaatccgaattggttctcgactcaccgtcctgatctagaacctcttggcccggggccttccactctgcttcgggtagcatctctacaacaacaacgtctccgtcgatcgctcggttcatgctctcgcgtccgacaagaagaatgggtttcccgaacgcctgtgcattgacatttccctgcacacggaacacatcagcctcgatctcaacccaaaaggtaaggaataattgagaacgtacctccagatagttgtaaggatttgcgttgaagtacccctgatgaaagactccgctcttcacacctgcaagtagagtcgcttgagggagatactgtaaaggagcgccacttcagtactgatgtccaatggttgaggtgcaaagcttgaagttcacctcgggatacagtttcttgcccgttccgctcttgttaccagaaggtcggtcggatccttctggcccatatttgacggcaacaagatcgccaagtctaactttggtcgactcgtcgatcattccgtccacgtagtctttcgtcgatagtgcgttgaagccggctgcgacagccttttcccgattgccgcggtcatccgtgagcagaacgagagacgggtgtgtcgaagtcgtgcgggaaggggtgatggtcttcagatggttttggtagaaatccagcgttaatcggattgctgtcggaaaaaaagaggcagaagcaagtgacataaatatccagattgtgacttggccaccacgtcataatcactcacctcgatcattacggtcgttaactgtctccctgacgatttttccatccttgtcctcggcttcgatgacatccatgccgttccccgtatcgtcttcgtcgatgcggccgaccgcttcgtcgcctcctgtccggtaccgttcaacttttgtggccgtctcacggcgctcttcgttccagaagatccagactttcctatcctcgtcggcaagtagagattgtagccggttgtacaacggcaaggaccggtgtctggtttcagctagagtggtcgatggcagaatgatggggatttcggcggggagcgattccaacacatcgatctgcggtacaactcgaattatcaggctggcgtccagcgaatacgtacccggtcgggtacttacctgatgaagaacaatgttggtatcaatcacaagccagtggcctgctttaccgttgaatttcgcatgaccacgagctccttctacgggcaagaccgccttgtagccaggaaaggaagagcactcgaagcatgcctcatatccgcacgggatgtcagatcggagataacgctcacgcaagactgaaacagcctttcgttagactggctatgacacgcagagcagattcggtgtggactcactctttacgaccctccccttcttggttttcttcaagaacttcttctgagcgaaggcgaggtcctcccgcgtccgctttaggatcgtgatctggggtatcgagaagttgctggacataacggcgatattcgagactatctccagctattgactagtacaaggaagtactggagtcaatccggacgaaagtcaatcgagtcgtctttcacggttacaagggttccaagtgagtaagctttctcgatgagatcagatatctgaggctgacatcaagcgctactaagaacctgacatctcacgtgactggcggttcatcggcaccttccgatcgaggacccgaccagctacgagctacgagactcttattcaacatctacttgtttacatagctcgaggatcagcagtccatagctttgagtctcgaagtaagttggcacaccgattctattgagatagatcagccctacgatagaaaaccctcggcttcttcagcgagccgtacatgttttggtggccggatccacaagcaaaagaatgagatgaagccatcgtcttaaagcccgcccgccatgccaaaagactggtcggtgcggtccgccttggacctcatcgcctcgactagcatcaaagatcggcaggaaggactggaacttctgacggagatctgttcgaatcccagcaattgccagtccctacaaaatacgccagaaggcaccggctggttgcaggtcttccagaccgtgtttgtgctggtgaaaaccgaacgaacgactgcgctgaaatcactcaaaacatcaaaaggtaagcagtctgatatatatatatatatatatatatgtactttcatcttaatcgatgcccgttatatttcagcggctgttgcgcgcctccaggccgccgctggcaaagtccgttggctcgtagaagtctcgtatccctacctcacaaccaagccacttgctgccctgttctcgcacctcatccaagcgatcatccacgatgggcaattggtcgagtacatttcgaccgactacataaagtctctcaaggttctactcaatttcccagctcacctcgagcatctcgacgagtatacatggcgataccttatgagcatcatctgggatgttgtgctggatcgaaggctggagcacgacagagacgactgggatgcagaagcgcaggaggaattcgaaaccgcaactactcaggtcgaggaagattcagacgaagaccgaggtacaatgaaagctcgatctgggtcttcggctgtcaagcggacaaggacttcaaagtcagcaggaagcagcgaattcagtactctgtcaaggaaggtatacaaaaccttatcggcagacgctacagatctgctgtcactgtttcctgtgctgttgagctcctcttctgccccgatcttaccgcgaccacagctgaaagacccggaggcttcgcaaatgccacatagagctgggatacctctactccgtcgggtgctcagcttccttcaacgttacccgtcagagaccagttctcacagacctgtactacaaggtctcaacatcctactgagagagctcgagctgaacgctatcaacgaagtgactcgatttggagccagatcattccctctcctagtcaaattatggaatagtcgagacctgtcgctaagggatcaagttctcatcgctctacgaagactcgttcatttcctcgccagggagaagcaaagattgggagcggcaacttatcggacacagacgcgcagtctttctcaaaacactacacaagcagaaagcgataacgccactgggggggacaagatgactagcgaacttgctgaagctatgtacgagctacaagaatcgatatttaaggatgctggtaacaagagaggtacattacctcttgatctcggcgccctgcatctacgactgccggattctgccggtcgtctcgaccatcgcttgagtttggaagacacgtccttccctctacagtcctctatcttccgggttcgtgctttttctcacgggacgatctttgtggtcttgatactgactcgctgaccaacaggccagcccttcctttactgctcgtctcacggcttcctgggcgacattagagctgaatgccgattgttgcttcaaggtaagcttcgtgtttactttggtcagattaattgaattgtcaacttactcagttccctatacctcgatctatttggtagcttcaccagactttcgatctggtcgagaggcccaagccgacggctactgctccttccactaagcgattgaaaaagaccgaaagagagaacccgatcatgacgcttgtgccttccatccacacatcccgccagccagaatcccgcatgttggcgctacaaactctctacttcgtcattgagcgtcactgggcagatctatttctggacatccaagcggagttattgactcaattgctctcgttgactaaggactcggacttggacatccagcagtggaccttcatttgcctgacttctgtctgcacgaaacgatggatggtagctcctccgaaggacaaggacctagatctggcgccgaatggcagcatagccatcttggaccgtggtccggaggagctcagtatttggcaggagatttgggtcaccgcattccgccgaatgaacttggcatccggagcggcttgtcgaagcgcttgtctcatggcacatgcgctcatgctgtcgagcttcatcccggaagctagcgtttccacttctcttgcaagcttttttgaacaaataatcacgcaaggtccggcttacacatgcgatgcggtttgcgctttcgtcaaggtcgcactcgatcacgccgaacgtgacaccaagctatatcggctggatcaccaccaaaaggtgatggtctggttcaggtgtaattggcgtataactcaggacatacgctcaggacatacagcagtatacgcaagcgtctcacctgaagctatcgagctgcttgccaagatcgcggggtccctggtcgctcctaccatatggacagagacccctgtgattgtctctgacattttccaatacatgattgaggagcttgagaccagtcccatcaggaactatctcctaaacgctgcgttgcctgtccagtcagcaagtcattcgatggatcgtcccctacccgcggatacagactcgatcgctctcaagacctcgctttcacgatcggacgtgaacaagaccaggcagatcctggatctgcttcacgacactgtcagggacgtactggcaactatcgattgcggctccgccatgaaagcaaagaacctggcagacatctgcgtctttgctattttgatgttagccatcacgagggatgcacaagaagaacctgaacatattgccgtggaaacgacgtgcgatcttttcgagcgcgtcctgaaaaatgtgcttgaggaaggcagctatggagtacaggaacaagcaggccttttttccagtttcatccccatcttgggacagcctggatcagggcgactgcagaatggtcggtcccgattgtggacgatgctggccatacccgatgcacgagcgggcgtgacgacccttctcgccctcgatcagcctgaagcgctcgaacatattgcacaatggcgtgcagacggcctgcttgcgactgtatggcaaactaccagggtgagtcgtttacgttggcatttacctttgggtcgtcgtcgaatctgacttgtagagtggtatgacatgcagctcttcgatgtactgaaaacacaggcacctctgcttcgccgatatctggcgactggaagggctcctgacgggctgcgcacgctttctggaactgcgatgcgtatcagtgacgacgattttggtccgatccgtcaggaagaagacgggggagtcgccagtgacagcgagatcggagagcaactcccgctggggcgcagttatttcctcgctatacgagcgctcaccagtccgtcgcactatgcctcaggaatgcaaatcggaaccagggacgtggagctctacaacattttgatcgaatcagaggaatataacacatatctactcggacaagcgatttttcaggcggtcgaagagcaaagcctcgtcttgacgcgtaaagccctgtcgtccttgctcgagcttgtgacggatcttctgagaatctacgtctacaagaggctgccagctacccgacaactcatttaccgatttttggcagccacactttacacttggatcgatgcagaagaatcggtcagttccgcagctgaggaattgctacctctctggcactggagtgccgacggcctcacctccggcagattagatgcatggcaagaccggtatcagactataactctgctggacgaattcgtgcttagagacccatcagaaacccgctggttgatcgaagggctggtcgacggtgaccgcgaatcaccatcttccgtattgctccattcgctcgaggactgcgacagtcgagttcgctttcgtctggctacatcggtaccaaaactactgcagctcgacactcccattactgccaagccgagcggcttttacctcaggatcgcacgcaattttaggtaccaaggcagggacaaggagttcatcttgtcgcgggccatcttgatgaccaatgtcgttatcgccagctctggcgctcgaagggctccatttttccatctatatgataccgtcgcggggcatccttcgttgcacactcatattgaaaccgccttcatcgccatcaccagactcttgcgtctcgcatctttttcccgtctatatctggaatatgcgaccagattgcttgctgcccagggcagagaggatcaagaccccttacacattccagtctcgttgtacggattccagtctcgagcggtatgggcacgtgagcttatcggcgcggcaggcgcttcgctgcttttgagtcccgaatgcgatggattttgggaaagcttggttgagcttgctcaggtcgacaagcccgatactctgcgttacaacgtgtccacagccgtcgctatggctgctggaatgaaggcaatggcggatacgaatggacaagcgttcaaagctgagctcgcaagattacacgggcgtttcgccaaatccccacctcggaccaacagcaaatggttttttgataaaagcgagactgcaagcatgattgctacgctgtttcaacttgcggatgagaccatgtctcccgccgaagtccacaagtttctctcgcaggacaagtctgaaaagagtggacggcaggccgcgatttacaaagccctgcttttccctgtcgagtacgacccttccatggaactggaggaaactattacgccaaagaatagtcccagggaagtcttgcgtgggatacaattgctcgaccaggaattcgacctcgatccgcgtttgatcgcatgcaacactatcatgcagataatgtgcaagatcgctgcttcctgtctgatcaatgaaaggcgcaggctcatctatagtctggcactcttggtcgcatcttatccggataccatcttggaacctgacatatttgatctcctcttacgcgccgtcgcctgcttgtatgagcaaccagatctgagccgcctcatggtcgatttcctggcgtggttactcgaccaattattggagggaacagctcagtgcaaagcgccggtcccattgctatctggattggcaaagtcggccaagcattatgccgacgtcgccaaaggctccacctcgactgggcatgacgcgcttgctctcatggaaagctttatgaaccgtttattgaacgaagagaccggtcatgtagactcatcgaagctaaagctagctcagcaaatcgctcgtttacttcctctctggcctcgtactctccctgaagtgcttgagagaaaggtctcgcgactaacgtacgggcagatacgtgaccaggcatcacacaccgacgtgacagcggggaaattcaccttatcgaaacagctggccagatttgcacatgcgcgcttgcctgcctctgcataccgtagaagcacgttttggcatttacggtcgagcatagcaagtggatccgacctctcctacgaggatatggaggctttcatgttactggcatacacttgcgatggcttggtggaaataccgacccacgagacaattgagaagctaaagggatctgctggtattgagatagggtttctacaaccccttagccggcgatccgaacctgttgcagcttccaaacgtcggatactgtcgctgctcttggacgatatgcgaggcgcatcgttatcgagagtgccccctgcgtacagggctctcgccggaatagcatcaatcgcacccgaattgtctcagtcagcggaactcgaccctatctcacatcagcaggtggctctgctcgcttctcgtgtaccaggtccgcgccaggaattgatccagatggaggatctgacagaagcgagtttggaacgaggcccttatgcgaacacgcatcaagatgccaaggcgtggttgaaaggctttggacggttgctcgtccacgcaatcgcttcaatcgctggatacgccgctctgagccatctctcaagtgtgatgaccactgacggcaaattggtcggcagcctgataccccctttgctacatctactgctggatgcagaagtgaggtcgagcccattgcaggcgtcgagacgccagatattatctggctacttcaattggctgttgtgtcgtccagaaactgctcacgactgtagcttgaacatagttcactcggtactctacctacggaactttgtgcctacgggatccagtacgaccgatcggccgcctacctggttggagctcgacctgcgtgccattgccgctgcggctcttcgatgcaaattgccagagacggcactgctcttctgggagctgtatcgagatggggaaacggacaattcagacttaggagaagatgacttgacggtaagctggattgatctgttcaaagaagaaagactcgctcgaatgacgactgtcttgctgtttgtagctgttgtacgatatttatgacggtgtcgaggaaccagacggtttctacggagtaccattagctggtgatgcacggagcgcagttttgaaacggcttcatcacgaagaggactggacacaagccttcagctatcacggtgcttccttcgagattggcagtacacgcaacggtgcagtgccgctcgtcgccagatcgctgagagccttcggattcgagacactcgcaggcacgcttctccgagatgtagctagcgatggagggcacataccattggacttggcttggcggacacggcagtgggatatcccgatggaagcactcgccgacttcacttctcaaaaactaggcgctagtgtttacagaacattgcgatcggtccaccacgcccgggacgcaaatcaggcttggtccgtgacaagggctgcgctgagcgaagcttttgaaatcttcggtggcatcgggatagaagatatggcgggcatccggtacggaatcaagacgttactttgtctgcgagaagtggatttatggttcgcggatcttttcccgctcgtccaacttgacgattttggacatgacaagtggagggctttcaagaccctgccggccaatatggagtaagtttgatcctaggcttgcagtgacagttcgacactgatgtcgccttctcgaattgttcagacatgccatggccgatgatatcctgaatgtccgtttgagcctgttgcacgcggtgaaagcgtccgagggcccgcagctcggagacctagtgtccgtgaggacggctggccttatttcggtggaaagagactgcctgacggctcttggagtactcgctcgggcgagagcagacctctcaggggctgtaactgcggtgacgagagtccaaaatctctcacaagctgatgctaatgatcactcaaccgaattcgccgaggtactgtggttacagggccaacatggtctagccctagagcagctcaaaaggctgttacgtaccaagatttacgcgagacccactaggccgcaggaattctggctcaaagcgaatgtactctccttgttggtgagtaatctcagtcactcttccgaaatgaacgactgtgcctattgtgacccgggatgtagggcgaatggacggctgaggcgaagcaagcgacagaaatcgacatccgcgaagactacttcaagccgtcgcagacagctatatatcatgcggagaagggcataagcgctcagcagatggctagtgtgctgttgcgttatgcccaattcgccgatcagcagttccaaaccatgtcacaatcggaacaaatcaaacagctcaagccccatcacgccaggcaaatggctgaatatgaagctcttcatcatcatcgagtcaaggccgcgagagacgatcctatcgtgtacgaagctcttcggtcgcttaagcaagaatgccagagggacaaagaacgcttgagcaagcatgaatcagacagactggagttccttcggactgctctggcagtgtacgccaagatcatcgcctcgacagattcgcatgataatctggttctcagattttgtgccctctggctagctaccgagacggacaatgataccaacatctacatccagaaagcgctgaaagacataccttcgcataaattcgtggatctggcgtaccagcttacagctagacttcatcccgctgaagatggagccagcaattttcatatcaatctctacggtctcgtgacccgaatatgtgcggagcacccttttcacatggcatatcaagtcatcacactagctgcacctgccgtcagatcatccagaaggatgtcctccaatgtcggagaacgcgaacgcgcggcccataccctacttgcgcaagtccgagcgacgacgggtagatctgtcgaaatcgatcagctcgaacggtttgcgaggtgtgctatcgcctgggcgagagaggataacggcaaacgaggcaaagatggttactatgtcgcaagcaaggattcagcaatcctttcacttcgcgacatgttgatacccgtgccgaccgcgagcgtagccaccgatccaacgatggtctatagaaatatccctaggcttcgtgcttacgagcccagattcagtgttgcgggcggaatacaccatcccaaaatcatgacatgctacggaacagatgggcgggaatatcgggagctagtgagtcctgatagcaatcgattggacctatagataacacctgagctgaccagtgtcttcgaacagttcaaggccggagacgatacgcggcaagacacgatcatggaacagctgtttaagctcgtcaatgatctgcttgataaagattcagaaacgagaagacgtaagctgcatatgaggacctataacgtcctgactcttgcggaagaaacgggcgttattcaattcgttacgcaaacaatgcctctggccgaatacttgttgagcgcgcatgaaaggtaaatcgagagggcgttagcgatcaacgccggctgacatgctgctcttccgttctagatatcatccagaagacatgaaagtgaaggagtttcgagaaacgatgcgcaagatacagtccggagacgaccccgatcgcaatcgacaactgatagagacgttcaaggagaatcgcaaacgattccgccctgtcatgcggaatctgttcatcgagaagaagaaggagccgctgagctggttcgcgatgagattggcatacagtcgaagtctagccgtttcgaatatcgtcggctacattgtcggaatcggagatcgccactgttccaacatcctcattgaccattcaagcggcgagatggtgcacatcgactttggggtagctttcggtcaggtaagcatattatccatccgacgcgccgtgcgaaacagctaatgggccgtgttgcgaacagggacgagctttacctattcccgaattagtaccatttcgccttacagccgatctcgtcgatgcgctcggttccttcgggactcagggtgtctaccagcggtgttcggaaaacaccctgcgtgtcatgcgcaacacatctgaacatatcctcgctattctggaagtgttcaagcacgaccctcttcataggtggtgagcctgattccgcagtccagctggtagtgaagctcaccaaagggccgatgcatgtcctacaggaaaattacggctgagaccatgaaaaaggtacaagacggacttcctgtacagagaaaatcatccaagtcggcctctgaaataggggaccgagccaccggtcatgccgaccaagcacttgccgatgtgatcaacaaactagacaagagaatgagtgtcgaatacacagtcaacgaatggaacagaaacgctcaagctccagccaatctagcagtaattttcgtcggtaggtcgagctcgtgatttgattgcgggatttccgcgcggccgctgatcattggaattgctacaggttggcaaccatggctctgaattaagcaacgaacgagaaacgatttaatgtcccccttacgaatccaccaaagagatacatcgctgtaatggcgccatcatgcaatcacaccgactggcttgatggtcgatgttgtgtaacacgctgtagcagaacgactgaatatccatacgacgaacagaaagctctcagctgttcaatgtaagacaatacatgtagcaggagccagactcgagtggctgcctgtgcggcggcttgaggccatgcgccttccctgagacactgcccccgtcgaatgttgtgagcttcgactctcggcggcgatcgacgtatgaacttgtccagatgcccctccaacgcggatttgttcgacttcttctgcatcagcggtgacagagtcactggcttgaaatccctcaaagctggtttggaggaggatggatcctttatcaccgagttcggcggagccgtccgagcgctcactctgcccgatactacctatgaaagaccgttctgcctcttcgccgtggtggtctatcagagccgttgatccgtacgtcgtctttctgacacagcccactattatgtgttctgtagcagcttcaaacacgcctcgcgatacggtctgaacggttcccagagacgaattctcactggcagtcggctggaaagggtttcgaagcggagacagcataacggccccttctcggccgagatcttcgttgatagtattcaggacaaggtcacgcgggtaaagggtcctcggcgtaggcgaatcgctagagctaacctcgggtgtggtagcagactccgatgaagttgggctatggggcatctgacctccgcttctggaagtccctctgaggcaacggacgcgtcggtgggatggagtctgactgaagttgctttcctcttcatggtcggatttgccccatagttcggtatcgtgagaaaagtttgtgaacacggtcgaggtggaatccgatgtctcccgtctcccaatacttcggaccgcttcaaacaagccctctcgggtgaggaccgggagatctggagcactcggtgccgctcgagggatcgatgacatgctgttcgggtcggtaacctgggcctgctcgatgggatcagagatcatatctttgctgaggcgccttttatcaaatctagcaccaaagaaaactgcatgcatcatcctcctcgagaaggtgctagcactcttgctgactcgtacgatgagagaagagctggatggaaccattgggtcggacgattcctggcttaaattgcgttccacaagggtcctggccgagtatgtatcctcgtctcgcttcacttcgtcttgagtccggtcgacattgaggtattggctgctgcgttggggccttgagaagattccagtttcaggtcccagaatcacagactgcctcatgctcaaactagagcgcatgctgatatcacctcctcggggtttcttgtagaacaagtagaggaggaacaggatcaaagccaggcaagctatcccgactgccgcccccaaagccgctcttgcaccggcaccgatgttcccagacttaggggcaactttatcgtctggagctgactgggctagatctagttgaaacgatagtgtgctgaccgcggttgacgttgtattcgtagcgcggacttccactgacacgattccgcgcgtttcaggcaaccagccttttaggtacagcccaccagccgaggcgtctaaggagaccgcttgtccgaggtcgctctcggcgatggacatttcaaacgacagtcctgagacgtccgcggatgccagatacccgctaaggttggcaagcgcctctcttggcagatatgagccgctctcaatgaaatcttgcctccctagcaaagctggatttgtcacattgctggtgaaggcgtaaggttcgacctgcactgtcaggttcgttgagagcaagtcaccaaatgcgtcgtatatgccgactgggatactggatacccgaccgattcgctcagttccaggattgaccacgatatctcgagtcgcctgatcgaagcggatccaaccgtctgtggaatcgtcgattactatgttcgtgatgtttgcgggcgagatcgattgcccgtcaagctggatttgactccaggtcgagatcgggatcgtggtgggataaccagcggttacgttcagctcaagcggatcccctctcagctccaaactatgcagtccgaccgttaagttgaaaccttgcgcgacgtcatcgtttccgtacgtgtccgagcccatcaacttgatgcgacaaacttgaatgccgggcacggtaggtgagaacccgttgaaagtcacagtctcgttatcgaaaacaagccattccggcaaggctgacccgtcttcgagagtagctgaatggtagataggccggtcattatcggttcctttagggtagacgaaaggatgcaggagaccgatcgagaagctccagccgggtggcaccctcacgccgggatagaaattggagtcattagcatagacgaatgcacttgagattactgccccttgaatcgttccattggtttccgaagcagtgatttgggtggccaaaggtaggttcacgatgggtatgaccctaccggaggtggcgccgtctgtgacaggcagaacaggtctgggatcaactgggacgagctgttgtggaacgggcagtgctgatacgatggacgaggtaaagctatgagtggcgaggaaaagaaggacagctagtcggtggaggaggagcatcgttggagaagctatgatagagcacgttagaaaggcaatcgaatacgttcaaagatatacttactcactgtgatcgacggtaatgatgagaactccagtttgggcacgatgttgggctgggcaaggcgacaaggcaagataggggtaacgactgatgatggacgatgtggtgctcccgagcgaatgatcgatggtgggtatccgaaatgagtggagttagaatggtttgatttaaaagggcacctaggagagacgagttaagcccagtctgataggatgtaatgaacgctggccttgctcactgggcagcgattggagggagtgtagaattattcaaacgtgattgacggagatacttgatctcgtgtggtatctcgatgagtgctacagaagcagattgccggatctggccgaaagcttagggggtaactcctgaatcgattttgaaagcatacgggtgtgtaagcaaaatgtatcagatcagaaccgattagaccgcgatgttcgggaaagcggctgtctttccgtaaccgggaagagggaatcgctcacgtattatgcgttgagagagaagggagtgaaggcatcaacgagagtattgtggtgaggataatgagatagcaaatttctttgggtagcacgaataggcctagcagttgctcaagaagatgtgagaatatgacaccgatcgcgtcgagaggtggcgacgatggggggtggttcgaagctagtcacggggtctcgagatttgcgatctgaatcgatcaaaacaaacaagttttctcgaatctgatcagaatgatcactgattactactgatgatccttgaatggattggtgggaactcgctgccgatcgccggccaggcaggacaagagggcgatgtgttgtgactagggaatgaaagccactcgcgctagaacgcgttttctcggtcgcaatcaaggcgctggaccaaggctgaatgaaacgacgtgatccggtagggctcatgaatcatgatcgacccctatcatgatcgaggtcgatcatgttgtacaagcgtgcgtgtcaccacttcggtttcttgctgcttgtgaatggtatgtcacgaggacttgagttgacagaccagtgtcaagtgcgacctcgactgcggctcccgacaactctcaagccacaggaagacgggccaaaggatgtttacagtataataaaaccgcagcgatccccttctacgttataattattttgattgacatagagattgactttctccctagcaatccgtgatgcgtgaacgagttcgcgaaatacaaacaggtggagtacttcaattctgtcatccgcgggctgcctttcccaatttcatgtccgtgaggctggacatggatcgacaggtcggccctccatctccccatactacgcggcccgattaacgactcgcgattgatgttttcccacgcaagaccgtcactagatcactcacatcgcaagaccgtcgatcacaacctcggatcggtcgtaacaatcgagcgctgatcatttgcatcatggttcaggttcaccgcgagggtcagacattctacaacgttgcgacaggttgcagtctccccttggctcctttgataggaaccacgaggacaaagctgtgtaaacacattccatcagtccttagatgttggtccgggatcccccgcacatcacagcagttgtgactctggtcataacgggaaggtcatagagcatcaagattagccggctgctaagtcagatctgtattgacaaacgccttgcggcaagtgccacgggagagctacagagcacttcggcgagattgaaaggtcggacttgatcgagtctccaacgcggggatactctttgcggaagtactcgtacaagtagatgacaggacgtggaacgctatctactgatgacctttctttctacttgatgtaagcgtttcgttggacgcacgaccccggtttgggtcaatgtcgcaaaggcattcaaaggccatggcgacggaggcgcgtgtcaacggactggattacgtatggacaagaccaggcgtagtcagagattcacatgtattgtttatacatgcaatctagagcgagggaggtgatatcccgtctcgaccagatacaagatgaaaacaaatgtatagaggtaaggaaaatggtgtaggggtgaaggggtaacatggtaggttttgggatgatcgattgaaagtctggaaagattaggcgtttagaccttgacctgtgggaagaagatattgcatcagcgtgcacaatcaaaaagatcatcgctgacacccgctcgcgactcacctccctgagaccgtccttccagaagatcatgtaaggggtgataccgtcctctcggtagttcatgaggacgaccataccatcggggtccatggactctccggtgaagaactcgtagtccttgaagtttccgatcatcttcttggcaaaggcaccagcggcggtctcgaaggtggcaagacgagccttggcgttctcgtcaccggcgtcagccttggtctggagagcagccttggtcttcttcatgtaagacttgaggtaggtgaggtaagactgggtgagaggagacaaacgatatcagcatatctgtgcaacaaacagcattgtagagaatagctgctcaccttcttgtcgaaagaagtgctctggagtcggaaagagtgagcgacgttgttgacggtaacggaaccgtcctcggcaccctcctcggcctcctcggcagaggggttggcacctgataagcgagacgatacacgacaaggtaagtatcaacctgaaaagacgtcaagcgaagaggctgcgatttctacgtaccaatgtcgacatcaccctccttgatggtgaccatcttggcgtcgacctcgtaaacgatgtcgtcgaccaacttgctgtgatgcatcaagcaggtcaagagagataacgaagacgaaagcaggagcaaaagaggaaaggggatcagtttttccatcatgtacggttgttctcgaagcatcagggctggactaacaggtcaaaggcatccgagatcatctcatcgccgcagtgaacgtcctcgaagataatcattttagtgtttaaagaaagtttcgtgaagtggagaagagaagagtgggtgagtagacggtttcaagatcagatcacagcggtgtcgaatagttgagggattttgttctgttgttgtaggtgttggtggtgctcggtgtggatgtggctgttggtagtaggagactcgctggtcgctgggccgagaacgtgatccaaccaacaaagcgcggatttttttttcttccaagcgaatggccctccactcgactcatagaattagatatccgcggatcattgaaaagacatcttcccatcgcgagttcggtcaagcccgaccgtggtcaaagccacaagcgatagcttctcctagctgcgagctttctttcggcttgccagagaagcaattgctttgatgccatccctacatcagcacgctgttgcatcctcgaacagtaccatatcagtgcgcttattgcagaattgcacggtagacgtgtcgaaatcgtgcccgatatgagctgcgaaggagactgctatatgcgcggtcttatcccggttgatcgtgttgcatcacgattaccttgatatacagtgcttcacttgccgtgttccaccttgaagactgcaagacacttcagaatcagcatcggatcgggccgatggttctagcttatgccagacatggaagttcgccagcttgacgatgaagcgtttggtaactagtacggtcgagagtcatgcgcaagatacccttgagacccttgagatttacatcgctgcgagcttctcgattaagagacatcttggctatgttgaagtttactctcagacatcacaaaaaggtaccatcgattgtcgaattgtcgatgcattattgttccatttgaccaaatttacccatttacctcatggtcgattgaggcaaggatggcttccgccatggtgccgctcccggttaatcacgtgatcttacctttctgaagtgggatctttggcgaactttaccaggatcgacgatatgttcagcctacaacctggcatacgtgaacgtggtccatcttaggcggacacataagaccggacgacatatagagatcagtgacaatggagttcttgccgttgccaaaattgccccggggcgatggctctgtagccgtcgctaatccgcacagccgtgagtttaaaagagcggtagaatcccgaattcgattctgacaaggctcttctgctcctccgtcaggttattatcactccttcagacatcccctcttcattcgacaccataatcctatcacttctattcactttgctccgtcaaaacctcaccgattcgctatcacctcctcgtctcgactactcgtctatgcacctcggacaggaaaggttatcaagaccatcacccggttcaaggatacggcaagaggagtcgagatcagaaaggatggaaagttgatcgtcgctggaggagatgaagggatcgtccaggtatttgacatcaacagtcgagcgatcttgaggacgatgaaggggcacgagcagtaagctgcccacactgctagcctggccagccttcctcacttgattgacgtccgcctacgaatcgcaggcccgtgcatgtgactcgattctctcctaacaacactgagatcggatcagcatctgacgacgggactgttcgtctctgggacattccctcccagacctgcctccagacgttcgatggccacaccgattacgtccgttcccttgtcttcaatcccaacaacccttctctcctcctctccggatcctacgattcgaccatcaagctttgggatgtccgaacgggcaaggccgagattaccatgtcccacggctcgaacttgtcggtagaggacgtcctgctcttcccgaccggaggatcgaacgtggcgttgtctgcgggtggacccatccttcgagtctgggacttggccatggcaggtggcaagtgtgtgagggcactgagcaaccaccagaagacgatcagctgcatgacgtttgacggtggggccaagagggtcttgacgggaggtttggatcagatggtcaaggtgtacgatgtcgaggattggaaggtcgtacatacgatgaggtaccccgcgccgatcatgagtctggccgtatcggtgagcattgttgcataaggtcgaaacgaggctacatctaacgcgagctctcggcacgtttttagcccgacgacactcacatcgcggccggaatgtcggacggaactctctcgctccgtcgacgagaccccaaggcgtcggaactcgcttcggctagcctgcagaacactgctctcaagtccggtgcttacgaatactttgcggactttgagaacatcttcggaaccgggcacgtcaaggacaagagcgctgccgtgaagggacgagaggagagggttattggagccgtcgacgagttccgggtcgagagcgtcaagaggaagaagctgaggccatatgacaagttcttgaaggaattcaagtatggtgctgcactggatgctgttatggagaatgtgagtctgatcaaaaccttcggctccgcgtgtcgatgtggctgagacgatacttgtccatgcagaacatccgaccagcaactgctttcgccctgatccaggagctcgtctaccgagatggtttgcgatcggcactgagcgggcgggacgatgtgactttggaaccgattctgcgatttttgtacaagtacatcgcggattaccggttcggacagatggctagtgaagtcatggatgtagtcttgggtatgtaaagcaacagccggacgcgaggcacctcgaccttaactgatccggaatcctcacacagacttatacagtctcgttctcggacaatcagccttgatagacgatattattcgaaaaaccaagtctagagtcaacggggagctgcggttccagcaagagcttttagcactcaacggagcacttgatatggtgcttgctcaagctgctttgggctaggcgtttgtttcgatctgcaatttaacgacatctgtatgacatgacgaaatgtagcgaaaatgacttgttgacttccactaccgcacacatgcactgacgtcgaaatcactccacaggggctgcaagcatgtcttgccggcgaatgcgcttcttttgtgactgtcggaggagcctcgcttgtagactcaaagaagactctgccggcggaccggctaagcttgccattgattagataggcatgacgacgcaagtgacataccattcggcgtatcggattgagccgaactatccgccttccctcgccaacgcgaataggccacatctatgcgggcaacttcacccttgatgatacctgctgcatcgatatctttccattcgagtttgacttctcgagacagattgatagagcagatcctgatcgcagcgtgctttatgacatcaagtattactgatgatccattttcgaatactcacagctccaacatgtcaagccttttcttcagtgacaacggcttccatccccttctgaggatattctcacacttgtccaagtttccattcgtggtactcttgtcgcagtctattgttatttcaggcccgcgcactcaccatctcgcccgacaatgcgtgggtgacctccagtgtgtaagggattccgacatcattttccaggggaactcacggggcgtaggcttgtcatgactcaggccgcgagctgtcaactcagccttgaccagtctggtgagctcttcatcgtcatcctgcgaccaagggcgtttgactggtgaaggcattaataaagctaaccacagctctgtcgcatttaccggcaagatccttacccgcagtgccatttcgtttccgcggcaaagtgtaagtgtagtagtgtagacgggcgagctctggatctcgatcaactagcgatgctatcttgcctcactgtccagggtataacgtgtgaagactgaaggacagtccaatcttcgaattaagggccagttctgaacgagacaattgccggtgagtcactcccaaacttcttcctcttctggcgccgtccaggttttccggtcagaacgcggatggaaccaccttcgaaggagacttcgtacaagcttcgaccctcgctctggaagaagtcgtgctgcaacatagaagcaaatcagtaaggcggtcgaggggtccggagtttgtgaggggatttactgatatgagacattatctgtgatcgtcgttttctttcattcgagtccgacagtatgatttggaggtcggtgtatgaccaccatgcgtctagatgccgacgtccgatcagatgcgctcgctggagcatcgctgcgcagcttactttacgaagctcttgtagagctgccatagtcatccccttctcccagcgggtaaaatggcccttcttcaaccgtatacctgtgttaaagcggattagtacttagagtctacaatctagctggatgcagtgatcgaccttgtgccgccagcatctggttggtcatgttcttcgtactgcttagctcggtcttccaagcctcttcttcggcctgtccagtcgtcgctccggaagggactgccgtactacccacttctaggagcaaccgttgtaaccgttcttctgcctctttctcttttctttctatatcaattgtctgttgctgagtgcaaggtggattgccacggtcggcctgactgtcgaggtcgataggcgcgtcttttcgtccaccgggtgcccaagcagctcggagcgtcctgttctccttgtccttttccaacttcttcttgcttttagagctttcggcaattgtggccgcaagcatcgcagcaaatggatctttcggcggtgcgctcgcggccgctgacgatttcgcctgtgctcgcgcggccttcttcgcccgtctctctacctttctttgtcgtcgctccgccctggcctgctttcttgcggccttctccgccttttctacggagcttggcactttcttcttcctgctggagatcaatgtcactgctggagctgctgtggtagcaaatgcagcgagtggcagcggaggagcctgagtagggctctggtcttcttcgtcgtccgtatccaggatctcgatgatctctgttgctgcgatcggtctaacgctttctacaggtctaggcacgtcgcttatggtcgttccagacttcttagacatagaactactcgactgagatgtgggtttagatggctgaagaacggtttgatcggccggtacgccatgtgtgatgttgctttcttgcggagccgcagcagctggttgagcagtcgctctatcatcgagggacgtattggagacttcgctgacatcactacgacttgcaacggcttttccttgcatttttctcgcttcctttcttttccgtttagcgatcgtggcatgaaagcgattgacagatgggtcaggcagcttttagtcggtcagcgtagaacgcccgaggctcacctcgaccgatagagttccgttgggcggtttgaccttctttttctggttattagataccttagcttataatacggtctccttagttgtaggagcgatcggtggggtagctgcgatcaccgtcgtctttgctggcttcttcacgacgacgacgactgagtgcgggtcgagcggtttggcttgatgaaagctcgccatcatgatgtgcatgaagcggcggtccatcttgcttgtgttgacagcgttcacattgccagatcatttcaatggtagagcatgagaacgatgtgaaatgtatcgccagtgatcaggagggtactgtagtcccggagaggacaaagagcgatcaacgagcagttgatcgatggatgagaggtgctcgacgccaacggatgcatatgatcttcggaagtatattggccttttgaggtttcacgtgactgccgcttgctcacgtcactctgcctccaccttgacgggaccacatggaaacgtttgaagctcgcttcttgcagatgtcccccaagaccggtcttcttaccaggagcgaggagcgataaggaagagaagctattctcgtcgtaaaggtacaggtcccacggcgtctttcgatagtgctggaatctcggccgttcccacccgccagcctatccacatgatcgtgctcccgcaataacatttcgcactcccgatcccgcactgagatgacgaaacgaaagtgtgacgtgaacacgtacgccgaagaggggtgatgagagttataaactcttgtatcctgcggacgggagttcttcagcattaacctcgattactcgaccttgcatgtaaaaagtcatcatatctcctggcgatgtcagaatcacttgtcaacaaggtcaaagatcaattcacatccactgtcggcgacgtcgaatcagctatgagtggtctatcaaagccctcgaatgaggaaaccgcatcacatgaacctacgaatgatcatcagaggggcgatgctacgccctctcatcgaaatgcagaagcaaaggactaccatgaaaaggctgtcaaagctcctaaagatgttgaggaattcatcgccggccagattcagggcaagcagaacgagcaagagctgatccagaaattcccgaccgacgacacggtgtggcacggattcgttaacgttcgtcggaagcatttgtaccgtgctcaacagtttgatgagctgaagtagagacgcttgtcatgtatagtgggagaatcatcctgaccgaaaagccgaagcagagaagattctcaagtgcgtcaggctcaggcatcttcgaccgatgaagctcccgctgacaagcgcttcataaccttatatatcaaactcaggcaacatacctggaccccgatccccgagtttcaattggtcccgttaccctccaccaacccgatcttgctgggtcaccggtggaaggagtatcacctagccttggggccgaacctgaacaagattcacgaggaaagttgggagattttcaaaaaggaaaagcgggacaatatggtcagtgctctgccgaggtgcaatgcgttgagatgcagtcaggttcagctgatttccttttgattctcagctcgtcgtcctcgatttccctatgaattgcgagccgaagagggtttgtgtctcttctcttcttgagatggccgtcacatgacctggaagcttactagtacagttgggtcctaccaggctgatctcctcgaatcgcacatcaccccgaacgacatccattttgtccgcaaccatggaggtattccgaccgtcgacaacattgacgattactccatcgcgatcgggggactggtcaagagccccggagagctcttgttcaacgatttaatagatccagccaaatttccccaggtcgagatgaccatcacgttgcagtgttcgggcacgcgcaggatcgagcaaatcaacctttatcctggagagggggacggtaggtggtagggtcacgtatcggcgcgcacaacgggtacttacgtgttcgctcgtttgtgctccgtaaagaattgttgagcgcgtaagtttcgtggcacatctatgtgctcagaaattagaacatgtctgacaatttttacacgcagaccctgggccgagggagccatctccaccgccagatacaaggttactctcagtgctgacctttacatcgaatctgcctcgctgacatgcgccttaatagggagtccaagtgaaagacgttttgcaacatttcggaggtgtcctgcccgaggggcttcatatcgaaaccatcggtgccgatacctgtgggtcctagactgaactgtaagggaaggcaggttatctcttcttacgaccttccgcgaaccagatttcaagaagaacaaggtgttcaattgtgagccgcaaaccgaccaggatctcgaccgagaggcccgactcatgcgcccccttccttctcgtaacagatgccgtctctgtgccgtatcgaaaggccaaatacgacgaggctctgttggcttacgaaatgaatggagagccgctacccaagatccatggtggacccctcagactggtcgtacctggagtcattggtgccaggtccgctgcgatagcccgccttcgtactgtatgactgaggcttacacccataatgacatttaatcaggagttgcaagtgggtcaccaacatcaatattctgcctgaaccgagtatggggccggtgcaacgacaagagtacctttactacactcaacagattggcaagcacaacgcgagtttcgcgcgcgggttctcgattcaagacatgcctgtgtcgtcggctatcctgaagccggctgacaaggaagtcatcgtccacgatggctcgattcattgcgaaggtgagtgacggcaatcgcatttcgcagcgggttgctgatgaacagattgacacctgtgcaggttgggcatactctggaggcggggcttgggtcgaaagggtcgaaatctcgatcgatggcggtttcatctggcacgaagtgagacggttctcgtgaccagattgttgagcgacgatactgatcgcggccgtcccgaatggtacaactttggtgtaggttcctgaagagaacttgtcgcccaagcactactacgcgatgaggttgtggaagatggacgttcccgtacctgtcgagggatggatcgagttggtcgtgcgatgctggggtgagcagaagggggtccgttcagatccgaccgagtgactctgttgacactaccatctgcgcgcggtcagactcgcatatcaacacgcagccgacatacgtcaggtcggcttggaactggacgttgcagtgagttcatcgcttctccttctgtcgtgtcatccaggcgctgatcagtatctgtatcaagcgtaacgtcctctgctcatcgcgtgccgatttactcgatcaatcgaacgatcccggctacggccaagcgattgcgtatccttgaagagcacggcgaaccgatcgcgcctatcacgcacccggcagagtttgccctcgagggcgaggacgagtatctcgagtcgatgaagctcaagggttctcgtgagccggtcgagtgagcgcagcgattttcaatgaggcgacggttcttgtttacgagcactagcggatgaagtccgaatgtaaatgtagttgttaatcgaatatcattgcaaaaattgctggctagatgtcgcgatgtgggttgtcagcctgtgtgtgacaatgaagtcaagcaagatatgatgcacctctatcacccacctggaaccaccattgaatctgcgcttcgagctatcgagcaggacggaggcggacttgatcataatgggtttgatagtaagtttttgaacaaatttgactcgtcgaacgcggtgtcgtataaaggctagtacaccagattctgatatctaaccagcaactttctggtaatctgggttcgattcccagcactgcgtatatttttgcctggcgtgaacgatattcgcacagggttcctctcatgagtggatcttgactttttgtcgcaagtttgacgaaaccgataacgagcttcgatagcaagaaagactctctatcaagatcgactgtacgtttcccattacaagtgtatcatagtgtacgtccgccacgaatctaacctaaattgaccgaaaggcgatgtcaacggacaattctacgtggttcatgtccgcgcgcacaggatatctcgcatctggccgacgatgcttgcagactgaggttgcgaaatgttgagcctttcggaaatgtcagtgacgtcgccaaataggcatgtagttgcgcatcatgaagctagatactccactagttccagtccacaactccacgttgatcatgtctgcaatctctagcgaatccgatcacgagcaggatgatctcctcgacatctatacgaagcttatgctcgactcgatcgatgtcccttcaatcgctgctgtgccagagccggctcaaccgacgacaaccatacaagggggtcccaaatccgacggcatgaatgccaaacagcggaagctcgagaagaaaaaggtcaagcgggaggagagcaagcgggtcaaggcggacttggtcgaggaagccggtgagtcgtgaccctcggtcggcatctacactaccacctgaatgcctgaccaacatcgtcgtctacgtctcagagttccgactgttctcgagacagcctatccgggtcatttccttgctcccgcccaaagagaataccggtatcgtcccgtaagtctatcgtcgatgcaaagcaaaatggacgccgcagctcatacgctcctggacaacccgcagaaatcctcgtcacgccgactggacaaagcaagagctttcgaagcgccgcgcacgtataagatcttcagtcgtcagtggcgatcgcttgctaaagtctgtaccaccgagcgcccgactaccagtaagatgcggcggaacattatgcgtaaacggccgaactgacgtgcaccgtacacagacgcagacacgaccacagccgtcggcattgttccggactgaaacctacccttccatccgtcctctccccaacttgcttcttgccgatcgacccaagatatacgcatcccctctgatcccacggaccgctcccccgtccaaacccaaacgacccgaacgtcggaacgtgcctaccatcacctcatcctacccttgcgactcgacctcgcccctccccgtgctccctcaaactcgcgccgaacagcgccgccaatctcgagaaaagaagaaagtcgtccgaagggaagaacgcctcgggctccgttcgttcgagacctccttgagcggcaagacgcagaaattgatcagaaagcgtgaggccaggttttgggcaccccctgagggtctgggaggcaaggcgaggggatacgcttatggttttgctgggagccgagaaggcgcgagggaggtacagggtaaatgggtacgggacaagatgcgcaagggggtcatcgaggagtgaccggttggggtatcgtcatcgagcctggcttcggtcgcccacagtcaacctcagatcacaggggagatttgacgacgacgtttctaggctcaaggacggtccagacactggcagaatgcccatttcgaagcgtcatcgacaagcgttacgtatacagttcggaagaactagccggtctataacgaatcgaaggcgcgctctgctctcgggaacgacagactcaatgtcagtgtcgtagaagcatcatccactttacgacggccctcgaatgtagacgcacggacatgcgaacatgtttgtatcgcaaatcagcgggatttgacaagcttgtcgcgctggattgagcgcgtacccctgggtcgacaaggcagtgcggttcaccatatcgcagggtccctctcgtcaggcaatatcaccatcataatgcccgcaactgtccgtttcggtgcatatgccggggttcaccatgattgattgttgtagagaccgcacatcacaccgcggatatcctcatgaatagtgtgatgatgcgtgatgcgtgatgatgatgtgatgccgattgaaatttggggttccctttcccttcggcacttggccgccgtctcgcgccgcctctcggcttctacgccatcaacctcatcatttcatcaatctactccggaatttgattccgcccatcagtccaagccccggcaagggtaccttgttcagacggactccacaaagcgctcgatggttggttcgacctaattcacagttgtatctcaaaagctcttcaacttgcggcaagaggaaggggaaggcctttactttcgcaggtcgcagcttgcgatgttccctagtctttgtcacttgtaactgtccgcaatgtctttgcctggcgtatccctgtgtactctgtgcgatctcgcgtgtgccggcgctcgggcgacacagccaagagcaaacagagcgagcgaggtccattctggtcgagatgtctgccgttcctcgtcgacgacatgtcgctcggcgtggcttgtagaaacaaacaacaacctgcagagtatagagtatagagtgttatcctagacattaaccccactcgacccgaagtggtacggcttttttatctggctagacttccgagcatacgaatcagctttcgaggctcgtctttgtcgtcgttcccctctgttctcgcgttcacacgagccgacgaaagcacgcactcacccaaccacacaaagtcggagtgactttccatacgatagacgatcaataacatcaggctacaccaatcaacgacgactaccacggcagggggcttcatctgcaaaagtctaccgaccatagaaagctacaggacgtatccataaagacgagggacaccggcaaaaacgcagcgaaaaacggagccatcagggggcagtctctcgactcggttggggacgacgtacgatcgatttcttttctctctcactcgacggtgacgacgagcgagctcccacagccatggctgtctctgaccaagagatacagagagaattaaagaacctgaggtacgtcggtttcgacgactttgaccgaaacaacgactcgcaagctcaatcgcttgctcgctatagatcattccgccgattgtcagcgacatcacagggtccgggagcgaccgctctcgacccggatctcccgcctgcctctccaccatcacctcaatcatcatcttcgagacaacactggcaggatggtagaaatccacccgtttcccctacccgatcaggctcccccgccagcgtcttcaaccggacccgtagcggctccatcgagcagctcagcgttcccatgcaacgacctagcatgaacgacgtcgaagatcgggtgatcggtgccgggtcaggcgacgaggaggaacaatcacaactcttctggttgcccgctcgcttacaccccgagctagcccctggcgagtttagagcgttcctcaagactcactctcataccgattcggatggcgtcgtcgacggcgtaggcgaagctacaggggcactcgcaggaacttcaggcaacgcagggggttccggaccgggactcgctcgatctccttcgtggctagcgaggagcgggagtagcggtggaaccggcgatctgggaaggaaacggtcgatgttgtctcgccaataccaaccccgggttaacgatggcgtcgaaagcgaacccccaccattaccctcggaagcgtcccagttgcgtcgatccggctcgcagcgggctaacatttacggaggagttaaaggagatcaaggggtcaccctggaagaattgcagaggttggaacatttggtcgaaggcgccggtatcggggacgatccaacacacatgcggaacctcctcaaacggaacttgagcttgaacgtgacgcccgagcgtaagtcgaaaaccagatctggggtctcaagctctcgtgatcaatatcgagtggccaatattgacatgatccctcggtgcagtgctcgaaggccgaccggattcgatggatcccgtagacgaggaggacgcgcccatcatcgctgctcgaccgggtcaaatcttgcgtcgagcggctcgtacgaggatcagaaagccaggctcgccggcggacggtcgatttggagcgccgagaaaggacaggtccacctcgggaacgtcgagcgatcacgctgggatgggggacgacgggcttcgagacgcttacgaggaagacgatcgtcgccgaggaccccattcagacgagagtgatgatatgtattcggccgagagcggaccgggtttggaggagaacatggataggatgggttatcgtcggccttctaacgggtcgacagaagaatccgccatctacgactcttacgtagattccagcaacgacacgtcgatagagtcatccacgacgtcgttgtcgatggacgattccaacgagtacggcagctcgcattatgacgactatgcgcaggacgagcgggaggccgagtgggcagaggcagagaggacaccgacggagagcatgtacagggatccagggcgaaatgctatccttggagacgcaacgcaacggtacgggaaccctccttccccacccgagactgtgcggcgcgaagacttttcggggaaagaggagcgtcagccagataatgcgtattccaagttgtacacgaatccaccaccgcagaccccgcccactccggtccagagggcgcaaccagccaaggtcgagccggcacctcctctcaagcgcatggaaaggcagcagtctacggagagcttgaaacgggccaaggaagaggaaaagaagaagcgaggagggttcttttcctcgaaaaaggacaaggacaaggattccaagcccaagaaagaggggaaaaaggaaaaggaaggcttcttggggtccctctttggaagcaagaaaaaggtcgaagagcctgcgccgttgaagttttcggccgctggacctgccgcggctgctgcactgttgggcacatccaagtcggcaaagtcgcttggtctgattccgatgactggccactcgcccacctctcccggattttcgccctacgccagataccctatccacgtcgaacgggctatctaccgtcttagtcacatcaaattggccaatccgcgccggccgctttacgagcaggtgctcatttccaacttgatgttctggtatctcggcattatcaataaaccgcagacacctccatcgccagtggcggatgacaaggcgaaagcgattgatactgcggaaatcaaggagagggtggccgaaccgttgccctcgattgcgacgccgtcggaaaagtcggcggctccgaagtcatcccgatcgactagcccggccccggctcctcagcgcaactcttcacccccggccaacgcgtcaccgccgcccgagcctgccgcccccgtcaagagggtaggtctgagaaagccagagacgcaaagccgcactcgcgctgccgagaccccggtccgaacgccccagtacggcgtacagaacatgcagatgcagcaagaatatactcgttcgtctaatgctcctgctccatccccttcgcgctcgcaaccgcctcccaacgcgggtcctcctgcactcgcagcacctgtgcgaagcagtgcacctaccggtcttcaaccgagcccccggctagtagaggatcaacctcgaggtcagatcccgcgatcggccagatcatccgacctgccgcacgtgccccagacttctttgggtgccccgtccaagcatcaaacataccgggagccgcccaccaacttgagggtcgacgtcgacctagcccggactgctggacagcctcgtcatgaagtccagagatcgcccgaggggccttatcccgttccgcatcatcgctccgaagttggctatcgggaacgaaagagcgccgagtctgagaaaccgcgatccccgcactcgccgcattcgggcattcaaccgggacaaatcttccatcaccccggtgtgcaacctggtcaggtgttttcggcccagcgcacctcgcccggccaacctgttggccagttatttagccacccttcgtatcagtcaccgacacagcatccgcagggcgctccggaacatcactacggacactttacggagcttccgccaggagcgatgccaccacggagcactcagcagacgcagcagtggcgtgctgcacctccgcctcaaccacctgtgcagtccaggtccaacagtcaatacgactatgagcaggccaagcggtctgcatcggcaggatacgcgccgaatggacctatcagggacatgtcgtccggccctcgttccttttcggccggtgatccccggtctcatccgcaacctcagtaccacgcacctcccagcccaggccgatctcagccgggcatgagacacgacgaaacgccttataatccctacttgcgacaacccgtgcagcagaacccgggatacccaaacgagcgacgatgaaagagtacatgcgagtgaaagaacggagcgatgtcacgacaatttacggagatgggatcgagaaccgccaagtatgagactgtaatacttcaaagcagatgatgagtggtatgcagatgttttgcgcttgttcatgaaatcggtggagccttggttttgcgatcgaagagtagcaataaatggagccaaaaaagacgaacgctttaccgctttcagacctgaccacgactcatccgacagtgctgttaggcaagatcacaaatctagcgagttttacaagatttttcgcgtaacgccttgcaattatggtagttcttgttcagatcgactgctatgtcacggtggaaacacttccccgtcgaaatgagcgttctcggacgactctatgcacaatgacgagcaacgtcgatatatgtacgcagatacacacgcattcgaaccgatatctttcttgggaggaggtgagtggagggggtgcgtcaaggaatacgagaaaaaggtccaatcgatgcggggcgaagcaaggagcaccaaggagcgcgcggtcagcactcgacatctcgctcaatacgtatcaatcgctcttgttacgctcgataagacacgcaccaatcttgcaggcgtcgggctccgttgcgaatctctgacaaccaaaaccagagatgaatcggacgcatcgacatcgacacagttcccatcgaatttgcgacacgggttttacgatgatgagtccagctgtgccagaaaccgatgccatcaagcagacctaggccacgtcgttgagccgacgggtatcggatgtccgcgctgtcacgctacacgagcagaaaactcagacaacgaattttactttcctagtccactcgtaaagccccatcgtcaaagctacttgtaaagtgctgattgatggcgtaatcatgtctatggtacaacgtgttggtcgtttcatcttggtcatcaggggatctattgccggttctaatctgtaaagggcaatcatgaggaaaggatatcagtaaatgctcgatatcctagccgacgacgtcagcacggactcactgtaagtcgagtacagagaggtcgacgagaactttttgccctggttgataacctatggcgacgagaattgcgaattgagttgcaagcaaattttcaaacatcttggtcgccgacgaaccttttctacagcctttagataatctccctcttcgcagatccttcttcgagcacggatcgcgaacaggccagcctgcagaatgggagcaaggttcagtcccctgacaccgtcttgatgaccgatcgacacttcttcacaggcttacctctgtggacacgctcttgagctctgcaccggtcgcattggtacacagtcgagcgaccaagccgaatcgaatgttgggggcgaccgacatgctgcgagacgagccagtgtgcaaacgccagatcagccgcgggtccgattacgggtcacaatcggccaggtcgacgtaaggatgacttacgtcttggcgtgaatccgcaagatttgctccctaccctcgaggtcgggcagaccaaactcgatcttcctgtccaatcgtccgggacgcaacaaggccgggtcgagcgtgtcgggtctggaagagtggcaatcgagtgtgatgagcgtatactcgcgggcgtctcacagcgcaaaagattcgacgctcacctgttggtagccatcaacaccttgatggccccacgagagtcgaaaccgtccagctggacgatcaattctgtcccgatcgaacccagaaccgattgagccactgaacgcttgtcggaagaggacgacgctgtgacgtacccaacattgttcgctgaacctcgttgtcacctccggctccgtcgtcgaaacgagctcctcctacggcgtcgatctcgctgaaaacgtcaatccgggtcaatcgccgtggatcaagcacgagaggcaacatctcgctggactcactcgaaaaagagaatacacgacttgtgctgacgagccaattcctaagatgtaataaccccaattcgggcgggattgtcagtagggccgtaacatttgtttaggctcgaggatctggcaacgcaggcgatgcatctctctcactcacgaaaatgttcctgaccatcctcgctccctcaccgacgtatttctgtaccaactcgctcccgatgaccctgataaacgtggcatccgtcctgttggccacggccctggcacagagggtctttcctgtccctggaggtccaaagaggaggactcccttgggaggctcgatcccgagggcgacaaacttttcgggctcgagcaagggggtctcgacgacttccttgatcttttcaatctgttctttgcaccctccgatctggtcgtaactgcgacgaaaaggttcaacctcgggtcagggagtgacgtcgttatcgtctgaactcacgtgacgtcgggtttctcctcgacctccatcaacgacacggtcgcgtccatcttgggcgggaggggcatacagatcttgtaattcgtccggtcgacaccgaccctcataccttcttcgatatcggtgggcgagaccttgtcgctgagtccgacgacgaatttggcttgttgcttgacgttgatgacgtacttgtcgccctcggggttacccgcgcctgccccgtcctgtgggttcagagcagaggcgagcgagtcggattccccacccgtagggttggcctcggtcccgcctggacccgtcttggtcgagccggccttgatgatcttggaacaacgagcgacttgcaaggtgtgttctccttgacgttgctatcgggtcggcacaggaaatcgaaatcgagtcaacgaggtaagctcgttgttctcgccttttcagaagggtaggggaccgggtgcactcgccttgtcagccataagatcccacatgtccggcctcgccaacccggtatcgctctccttgacgcccatcttttcgtcgatccgtttttggatatccttgagctctgcctcgatacgtttcagggcgagcgaataaggtccttgaccctgcatcccggatacgagagagcgtcagtgcgtgtcaatcaaggtcgggatggtgggagacaagccgctcacgtaggtctttaggatctggatatcggtatcatcgagcgcgacaatcttttcctctggcttatcgtccgtctttttctcgtctacagtcgaatgccggacgtggatcgcattggtatcgagatgagagtatcagagtcagtcatcggtcgctcgatgatggattcctcgccggtgatggacgtacacttttcccaattcctggcaggtggagcaaggaggacgtggtggatgagctaggtatcccggtgtgatcggtcgaatggttccccttttcgactcactctttaacgggtgccatgttgtcaactagacgatgggtcttgtgttatgttgtagttggtacgaggtgggtatgacgatgtggatgtttgtaatcggttgatccaacttgcagctaggtggtgattgcctcgattacgacagcgtccaagtgacattgattgattgaacagaggtcagactacagggtgatcactggggtgccaccctctggatgccataacgtgacgacgcgtttacggtatattgttacggcagctgacttgctgttcccctatggccctatggccctactgcctttgcccgtttcttccgtgttttcccttcgagacagacaacctctgattatgggattgtcaacagctagtcagccattatagtcaactcctcatatagataccatcatccatcacccaacacccaacaccgacatcgacaccgacagtagtgcgagcaccagtctcacacacctcgctcatctcgatcaaggaccaggcgatatcgctggacgacctctttaaactagcgatcgcaccagatagagcccctcccggacgagcaggacgcgttgtcccgcgatcgacataccccgacacttcgctacctctttcttctctttgatcctctcactctcattcttttgcgacgaccacgacatctgacatacacacccgccctcccacaaatcgtaactctataatcgacggcatttcgacaaacgatcaagctttcgtaaacgccttctcctctcgcccgacatgttccggaacgctagctctgcgggctcgacacccatcggtcgagccgggttcggcattcctaaacgctacctcaacctcctcgccctcgtctccatcctcatcctcatcagcctcttctccacccgggggatacgaggggaggggaggagagggatgagcacggttcgacggatctggaccaagaccatgggtagcgacgaagacgactgaccattctctagccttttgctcgttccatttctttcccaagacgaaagccgacatcaagagtaccagcatggccgcaaagacggcctcgcgttggaacatggccggacggaagacgacgttcttccatcggtactctaacccggtgtattcgaggtccggggtttgaggctggagggtcatgcccagccgacctaattgctgaaggatgatgctagccatgactgcaggacgtccggcgtgtgtatgtgtgggcgtgagtacgtgtggcaggtgagtgaggcaggtcgactagttttggtacagtcgtaactggtgattcggtgttcaaggtctactgtagacgacgatgagctggtgtcgctcgctctcggaagcaaatcatcgaagggatcaccgaaagaggaattaaattgataacaaggaggggcgggctggaaggggggtatgacgtgtgactgtggttatgacgtgtcattcaatgtcaactagccaaattaattaatattattgattgattgatcgggcacgatgacgaagatcgaggtagacacataccatacacagtacacacatacaaggtcgactttgtacaaatcatacggacaccatcaatctcttccgctcaatcaactcatcatcagcaaacacagaggacgatggctcatcctacactcaaccatccactcccttccatcccaaaaaatcaaacccccaactccctccctgaactcgcgcatttcctatctagcccgacctataccgaccagacccacccggacaagtttgtgagatggggcaaaatcgtcctggataaagtcttgcccctggatttcggagtagattcggggcagaatcagggtcagcaacagcaacagcaggatcagggtcggggtcaagatcaacctacagctcaaactcaaggcgatcctagtccaagtcatccgaattccatccccggctcaagctccaaccctgattccaattccacacccaacaccaacaccaactcgaacacaagcaaccgggaccacagatgctcggacctcgaactcgatatcctccatcgagaggcccaaggcgtggacggaccgatgacgcatcgatggggattgacattatggatcttgtaagttcatacatcgagccgagccccgagccgggccgaacgtgattctcgtcgaggtcgttcgtgtgcttatatatgattttgatcttgatcttgatttcgactttgactcgggtttgatggtttcttcggttctcggggttcatctggtgaccatcgccatcgcaaccggcatcccaaccctgcccccaatcctgactaccatcccaaccgcacacccactcccaacaacctacacgccacgcagagcacgctacctccaaggtccccggacctctcagtatcaccctacgacactactagacctcttggaacggatctgcgaagcggccagtcccgctgatttgggaacgtgtgacgaggcccgtgagtcgctcgggcggcgtgtcggctcgtctcgacggtcctggacatgcgtgggtggtggctgatggtcaggggatcctgtcttgtcttggcttggcgggtgtagtggggatcgtggtcagacacgtgagggagctgggacatgtcactcggagtgtgagtctgtccatctcggattcgagcgatggagggaatggaggtccggttcggtattgatccgccctgactttcctcctgcctttacctcggtcggcttctatcgtctgtcgatgtcgacaacctgtcgttttggaaacgatcgaccatacgaccgcgaccgcagcctgatcgagtgttcaacatcgcgcaacatgccatcaacgtcgtcgcaccccgatcacctacgagcttgtccagcgtccatcccggctttgtcgaggtcagtgggcacaccccgtctccctctcgagctcgagcaccaagctgatcttggacgagaccgacatgcgtatatgcatgtacagatgtgttatatcaccaagagggaccaggatgctcaacaggtcttggacatgctcatcgatgatgtcacctttgtaagccttgcttccgcctcctgggcatatgtccacatcaagcctttcccctttgctcatcggaaagtgatcctcgattattctcaccctgcagtacaagatccgaccgatggattttatcgagtttcatctctttggcgggttgatcaaattgcgagcaaagcaatgggaacaagcgagagaatacttcgagctcgtaagtcccgcgtgtcgaggtgtcggtgcagagaatactcacggcgatcatacgaacatgttgcggctcggatgataggcggtaacagccccggcagagaccacttccccgttacagctggaagcgcacttgaagttggtgctcgtcaacctgatcatcgagggcaaggtaagcgtcgtgcaccgttccgttccggccatccgggtttgacggtcctactaaacaagaccatcgccctcactcgcagacctttgtctacccttcgtacatctcggcagccatgaccaaggtcatccgtgatcaaggcaaagtgtacgacaagctcgccaccgctttcgaggagaggaatgcggggatcgtgtggatggccaaggaggacgatttcgccaaggtgagtcgacgtcgcacccctcctccccgcccacaccctcttccacgccgtcgcactccggattttggctcttcgacgcttatccttccgctcaccccattgcaggagcacaatatggagctgttacgcgaggtgcagagggcgtttatcgaatggcagatcctcgacttgaccaaggtctattccaagttgttcctcgtcgacctggccgatcagatctacgccaaagagggactcggaaagatttcggtcggactggtagaggaacttgtcagggatctggtgagtcgcgatcagcagcggtcgaggtcgagcgttaccaaatagtcaggaactgacccggacgacgtttctctgataggtctcgaggggcaagctctacgctacgatcacggccgatccgctcgtcgctcctcaaccctttgtcacttttgtggagaacccggaagagtaccgatccaaggcgaccgtggacgaactgaatgcgctgatcaggcagagtaaagcgaccggggcggtcgcgatgcagagggataggaagatggggctggatgacgagttcctgaacaaggcaagtcgatcgatatcgccgagctcggtcgccccaccagtacccgacggctgacatcaagccgacttgtatgccgcaggtcattcgaagggaagaaccgacatccagtctcgctggaggcatggccgacgcaccttccgggatcaagatgccgaccttgaagggagtaggaagcaactggaacgacatggggtactaaggccgtccgacttttcgaggccacacgcacagatacgtagatacgcacacacgccctcttcttttacgattcctttacgacgctcgcgaatccctttgttcgaccttttcgctgttgtagcttctcgagcgactcttacgacgcatgtcttcgtatgctatgaccagatcccaaaagatacatttaaagaagaacagtacaggatacagtaaaattgatacacggtctagaaccactcgccgccgccgttcgtcgcctttgccaccagtccctcgacctctgccgccgtaacaccgtccgctagcccgagttgatgcaggtccaattgagggagcccgtcccacgaggcaccgtacgactgcctcaattgggaaggtctaatgacctgacgaggagtatgctgcggcatctggggtgtctgcgggagggacagtccatgggagctccacgaggagaacggctgatgagacaacggcgtcatcagtggagatccgtggaagaagaactgtccaaacattccggggacctgatggaccggccgggtgcggaacacgggggagggggacgttgccggggtcgttgcgggcgtgatggttggggtggtgggcgcggtcgacgttggcgtcaggtgcggcggcatcgaaccatcatcttcaaactccaagtaatctgggaagactggaggaaccacctctgctctcggttgcttcttggtagccgtccgaggcgggaccttgcgagtcacagcggcgagatcactgggggaggaccatcggtccagagtctcgtgccgccattgagaggacctggtgccgagagatccccttccgcccttctccccacccttatctccacccttctcctctattcgcttccatctccatatctatagagacaagatacgggtaagcacgagagctcggggctggacgcgggcgatggagggaacagactcacgttcatctggcgggaccagctatgtacatccttctgctgccatacagtcggacatagctccgtgctaagtctatgtgcgtccttgactacaacgacagtaccgctatcgtcccagtggatgatcttcaaaggaacagagactatatgagcgaaagggcaaggggtagcaagtgccaatgggggagacatacgtcttgataccgaacgtcattcaagacgtcatagagattcggcaagaaagcggcacggctcgtcgtcttccttgccccgctatacgaggagggcgcaggggtcctggctgccgtggtgtctggtaacaaccgaatcggtaaggatgatgatgtaggcaatacgtaactcattcctattgtgctcactgcgcttgaccttcttcttcgccagcctcgaatgcatagagagccgggacatcttggtgcttcgtaaaggctatatgtatggactgagcagggcaaagataagactgatgtcgacatgtagaagaaaggagtgcgagtacgtacggtcctcgccgtagctgtcaggcaagaagctgtcttctgatgaattgcatgacgagctcgaccagcgaccacatcatgggcagagccgatttatgccgatactcatgtatctgaatcctttcgtaccgtagtgggacatgactagtagctagtattgctagatcgattgtattcaaggggtttgctattgtccgatgttgaacgacgatcgcgacgacggatgtctcagttggtcgtcttgaggagcaaagtgaatgcgattatattgcccgagatattatcaatgaattgtcaatcttagccattcctctcgtattcatatgcttggggttaaacttgaaagtcccctcatcgtctgcagtacaacaaggatgatcgtcatatgtgtgtgtgagatttcaggtctcggagcgataatcttgttcgtttgcatccgaaacaccaccctcctttgactaaacaacaataataacaataacgacgatctcaaggatgagatccccgggcattttcttgggcttcaagatcatcgtcgagtttgctcttggtctggttggtcagaatcttgttgtacactggaggaacaaggtcgacgtcagtccgcttggctgagatcagaggaatggcagaccggcgctcaccttgcaaaaagtcggcaacatgctcgtgacctgcactgtcttgagcggggtatttgttgaggagacttgaagcgataaagagcaccttgtgccggatcgattctccattcgctgccagagattcgctcgacatttgatgaagccgtttgagcacgtcttctgtgagcctgcaaagtgaattggaaatcgacaccgttcagcaagatcgggcccgaaagattgggggatctgtcgcaacaaaggagactcactcgtccagacattgatcgggtctacctgcggctcgtaaggtcgcatactgataaatcgcaaacctgaccaagacttgggtcaccaggatgttggctttgcaagtatcgaatgcataattgttggcaatatccctggggtcgatcgtatcggcgttcaatctcaatggcggcggtagatcatccagcagcatttgcagcgacttgatcaattcccgaggatctggagtggtatcgacctgaccttcgggcgtgggctgtccatgggcacgtgatcgaaccagccgaagtacttgcgataagagacggaagatgcgggtcacatggatgaatccgcacaacaacggagtcttgccaggcggttgctggaaggctcctgccgtagtgattagattgtcgtcgacttgcagaatgtccgagacaaagatgtcctcgtcgtgaaggagcatggggcaggagatcaaggctgctatcgtacggtcagaaccgtctgttaagagcgatccgcttgtcagcacgatgattcgttgcgaaacagacatgaatcgaactgacagagcacccaaaagacacgcctcctggtctccttctcgatggcgtccaggttctgctgcactgcaatgttctcgtcgtgcagtccgagggtgatggccaaacgcatggcttccgctagcactacgtttgcgtagttgtccttgcctgtcgaaccgaggtagatgtggtcgacgctgggggatggaagcggcgcaagtcagctctcgctctgtattccagcacgaggtctcttggtgcttactaaagtgtgctgatgtgaagcagatccagcggctcgtattcccgcttttgcatcgcccgcgacgtattgtgcagccttctatgtagcttgacgagctcctcctgagtgatgaactctggcatgaccgatcgaggtaattgcaggatcgcgtatgcgactatgcagatgtcaaagtggtatcagttccacctgtgaagccatagggatgaatggagcaatggcttactcaagctcatcaagaatatccggaacgtctcgtcatgtcgatccctccgggagaccagatcttgtagcgttgacggccagtgcaccagcggcagtaggacgtataaatgctcatgatagaggttcaagaacatcaacgccgtcgaccatcgagtgatgtcttctatttgagccgactgataagttgcaccaggcgtctctccagccgtcccgccggcactcgtcgtcgctgaatgcctcttgaccatgtgcgcgtgggagtgattcccataacctccagaaccaggatgctcaaagccgccagtaggcccaacgaccggaggagaattcggctggctcctcatccttgacgtttgatacgttcctgtgcgcctcgagctcccgccaagtcgaggatcgatgtcatcgtcgaccggtggccgatgagcgtgatgcccggagccaatatccaactccatctcactccagtgaccacctcgaccgggaatgtctggcaagaccaccgaactggtatgggtagagcccgtgcctggtcccgtcatcgggtacccgctcccagacgccgaggccacagcggtgttgttgttattgtccgtgggtgcttgaccgtcggctccgggcgtagaacagatccagggcatgaaccaattatcttcggcgctgtatccgctcaaaaattgattcccctgcccagcggcttgattggtcgcgttctggttatttgaggggggcgcgttgtgactcgaaggtcggctaccagacatgccaggattcaagaggttgttatccgatggtggtcgttgctgattccggtactgcatttgattttgattcggtccgctgttatgtgtagaggagaatggcgatatagaagctgttggggaggtatgcgcttgatgcggggcgaaagcgacattggggtcggccgtctgactgaatgtatggccaggaatgttattattatgatgcgactgatgtgcatcgaattggtaaccgcccaaagagggcagagggatgttcccgctttgtcccgtcaaggtgtcggtatagttcggatccgggtatgggaggtacggcaggttgttctggttgcctcccgatccttgaggcgagcgattgtcatgactttggtacggatgacgttgatggtgagggtgattgccagcgggcatcggatagggattatagcgtgcgtcgggaccgtacgaaccgggtcgcgcatacctgtcgacacggtcgcgcgaagacgaggtcgaggtcgggtggatgcatgcatcgtcagcgggtcgctcgcaacgtcgacgtcctgggccgagcgtgtactcacgggttaggaggtccgggcctcttgtgggtataggtatagctgcagtctctattcaaatccgtacatccctgacatcgcgtctcgccctcatccttgacacatttgaccctgattttgccgtccaacaagacgtggaggtcagctgacgggcctgcgtgaacttgctagtccttagcgactcacttgcgcagacgacagacgtcacaggccgccacctgtccgatcattgagttgagtgtacagagaaacagtgagtttcctcgtccattgtaaacttcgtgacgccttgaaacatccgtcctcccaccgacgatcatcaaagcagatcgaatttcggcgcaacgtcggcgggcatcgccccccctactaccgggcccaacacgtccaagttcgtccactcacccgtttaaccttgcctccatccgctcccttcttgttatcctgccctgatccactggtaacgttctcagtggcatctttgccggcattctcgttcgaatgaccaggattgctagacgccgaggtcgacgtgctcggacccggtgctttaccggtcggttcctgtttggccgtaccgtccatcctagtgcgttcacgagtctcttacgtgcggcccagattcatcgccacaatcgggtgtggtcgaacgctggacaaggtgagtagctattgctttggtcttgaatctgagtaacaaatcctgatgctacctgaatctaccgatggtcatcgagcaaatgaccactagcaggccagcccaggctagacacacggcccaccgtctgcccaccccggatcgggccggaagtatatttcgtccgtttgtccgcgtgattttcacggaggacaggacttgggtgggcctacctggcaatgcgtatttccagcctggacatccgatacaaaagtagagagaatcaatcagcaagggcatgcgtctgacgatggtatattagtgcatgaggtcaatgaatcggtgctgacgagaccgtataatttgtcggcgttggacgcgggaatggtttctgctcagcaccgattgactcctagggactcgctcgtcgatcgatttactgcatacggatctactctacttatgcaaacgcaggtcatggcctcgaaatccacaagaaaattcgtgtcttgagacggctgtacagccgtgacgtcggccttacgggtcagcgaatgaatcgaatttgatcacgactcgcaaatccctcccttttgccgaccccttaacctgggtcacccaggtcccgcacgagtaacccgatccctgagctcgctgtccgctgaaagcggaacatccctacccagacatccgcaatcaaagccgtcccaatgcaattcctctctgtaatgatataaagccagcccctaatattacatccaaaaacaagtcgagcctcgtcatcgaacggtacggtacctgctcgacgcacgcaggcctcgacgagaagacgtctatgcaaaaataaaggtgaaatgggggaagagtcgtaaaatggtagctcgtcggacagtacgtccgggggggttgcgtttattctgttccagggaacaactcggagatcagctgcttgtccggagggagacatcacatcgacgagccgaagcgaaactcacgttgagcacactgaacgcccggtccacctcgctcgtcctcgtcatcctcttccataccctcggcgctggccgcaccctgcttctccctctccgaaggctcctccaggtggacttcctcctggaagaccttgctagggatcttgttcagcttcctcctggcgggcagggaagactcgagtccgctcatctgctcgggggtgagcgactcggggaacttgatggtgagcttgacgtagaggttgccgtggtcgtgatgacgatgcgaaggcataccctgctgagggatgaccttgatgtcacctgcatatgacaggacagggcaaagacggcaccgtcagctaacatgaccttccgaatgattcggccgttccgggaactcaccaggcttgacgatctcgcccgggttgatctgtaccctcaagatcctgtcgtccaagtgctcgatgtggaactctcctccggccaacgcggtcaacaagtcgatctcggcctcgacgacgagatcgtccccgttcctcttgaaccgggggtgctccttctcctcgacgacaaagatcacatcaccgggctccacaccgggagcctgatcgctctcccctgggaacttgatctggtgtccactcttcatacccttgtcgatgtgtacctcgaggatcttgcgctcctgcgtcgtcttcttggcgttacacgtcctgcacttgttcttggggtcgacaatctcacccgttccttcacactctccacagggttgctggatctgctggaccatgggtccgagctgacgcaggtggaccttgacaccctgacctttacatccgccacactccttgacggctcccttctttccaccgagaccgtcacaggtcttgcagatggtcgatttcgagagggcgagcttttggatcttgcccttgtacaggtcctcgagactgaccccgatcctgtggaccaaatccttgccccgtcgaggtccctgttgtcgctctgcaaaacgttcaacggcgtcagagtcagtttgtcttctagggtgaagatcgtccacgctcgacccgactcacgccttccaccgggtccaccgccaccgccgaagaatccaccgccgccgaagaactgggagaataggtcggactggtccatcccgcccatgccaccagcgccaccctcgagaccagccgcaccgtattgatcgtacctgcgcacccagcgataagatgatgatcgtcagctcggaacaagtttatctcagggataggaggtcagggcaggcacttacaggcctcgcttgtcgtcatctgccagcacctcgtaagcgtgttgcaaagcctggtacttctccttgtcacctcccttgtccgggtgctccttcaatgctctaacgaggtcggatgaagatcagccatggacgttcgtaaggggggtcgcatggtctaaagaggtaggtgctcacccgatacggaaagccttcttgatctcggaagccgaggcgccgggcttgaccccaagagtgtcgctacgaattggtaggtcgagattggtgagtttcaatggaagaaaggaggtggaaagacaagtgattgatagggtgagcggacattctcggctggtccggtcgagctctttaaccacgtactagagtccactaagaaggccgataggggatcagcacacgttacatgataccgataccaatctcagcgagactcacgtttctttgaccattttgttgctaatctaatgcgttgttcgggggggaaatgtaatgtccttttgattcaatctgattcgatggctgtgatgcgatcggtaattgttgtatgcgagcttgaccggtcaacgaggtgagtgacgatctagacgatagtaatgggatacaactctataagaggaatgactttggggtgaataggatagtaggttgagccaggatgatctgagattgaataggtcattcaatagctacttgggttagcaatcggtcgctggtggccgccgctgtttgtgaatttccttctcgtttggtggtggaactttccagattccgggcaaacgcgaacaggaagcaaaaccgcaggagacggggagtgtgggcatttgaaatccgcggtgcataaacgggatcgactgctgcagcgcgtcatgaaacatgcattcgaaacatcgatgtcgcctatcactcatctctccgtcttatagtatacctctggcaagtctttaggattggtctgatgagcaagaatcaaagtaatgggacggaactggaacctttgctatcgatcaagcgtggcaacgattgaccagtggctagtgcgctgctatagatagccgtatactgatcaacaaaaacggcgtttgatgggccatctggcaaatcggaacctccgtggctatccctccctggcgcgagttctgaacacgaggacacagcgacaattgtattacatacattctggcagtctgttcggcgtcaaacgtcccgaaatatgacatctcttcgtccgagagtttggcaataagtattcgtcattctcgtgatttacatatgcctgcacattcagacaccgtattgattcctaagcgacatggatgtcccaatcgacccaatcgactcgtagtttgtgatagccagctcgctaaggccagaagaaagacgagtctcgtcgtctttgctagaagcatatcgtagaagactttccatttgcgattgcgacaactctgacaagccgcggggaacgttggatcgcctatttcggttcttgtgtataccgcttctgtaagacttggacagtgcaagtcggtcccgcttgttgagagatccacaagtattcagccccttttgctcggactcaagttcgtctctgcctcttgccgtgatctgtcttaacatgtcgattatctttttcagctcgcctccttccgctcgactggaaggagtatattcctgaacatcgctcagcagagcctcaaactctctggctccgatttcgttgacgagccacgtcattagtacagaactacgctcgatttttgagagcctcctgagttcctgtacgagcttgtctgatttctgcactttctgaaggatttcctcccagcagaaggtgtccagcagcccactcaggtcttcagtctccttcgcgttcgcctcagagatcttgtccggtttctcgtcgtcttcgacgtcttccatctgttcgaagtctctattttccttgtcaaaatcgtcattcattccgtgatcgccagattccgatgcgctcgaagcagagggttctgtcggaccatcagtgtccgcgtagtactcgtacacgctcgcgtccgacatcgcgtcgtcgctatggtagtgcagtgaagagacaccgtagatcgcgttcgtcggcgtttccagggtcagttcaagcttttgagtctctccgggtcatggccgcgactgtatgacagccattttttcacgagaacgtcccatatcttacgttcaggaggagagatgtcctcattgggaagactaaatactgcattcgcttccacctttatccccagaagagcatccatgagtggcttgacggtaagtctcacatggtcaggcaataaatcactcggatcgctaccgggctctggtgccaagttgtatgttttcgaatcttcggtatagttacacgtagtgcgatcatacatacattcacgtgcggataaaggatctccccgtcgtcctgtcgatgacgaccaaacgcagtcctgtcgcccaggtaatcagcattacgtgaatgacgacattcactcgtatacgctggtcacggcctgggtggattagtagtgtcagaatgacaacatccggctaatatacttgagacaaatccatgcggttttaaaacacttcaatagggggagggaaggggggtcgattgcgaatcgcaatttatcctttcaagcatgtttgctgggaaagttggcagcctcattcggtgcgcagtattcgtagtagatcagagtctctcatgcacacacttggttacgagtgccaaggtcagggattggagcagcgctcgtatacgtccccttgagctatcttgcacgtattaggaccccagagtgatggtctctgaaatgctggtaattgtagcgctcgctagagacttcaagcggaaaaatctgttcaactacaattcttcgtcctcatagtcggtcggagatgtttcattccagtcggtttgcaaagactctagatctgtacagatctgacagatgactcgtccagctcgtagatatccgtcggtattttgagacgggaagataagttctcgagcagcatatgaatcgtgcaaaatagaaggccattcctcccactcgtacctcttggtactcggtaatgatcgtcgtgcattgcacgcaaggtcatagctgtgtcatgtccttctttctgcaattgagggatttacattgcctcgaccgttgccaattggcgtatgttcatcctgctccgatttactgggtagactattgcgggtatctgtgcggtctctgtattcagctattctgcctgcgtttcggctgattcgccagtgtctaggcccttcctcggcgatcgctgtaaactgaagatccttgaagaactcattaaaggccggccgtcccttcaggctaagtggctctaagttttcagcgttccgctttacagcttgatatataaaggtgcaagttctctcgccctttttgttcagctcgcatcgtgtctcatcgcagtgttgagttccggtgggatcatttatcatctgttttgccgggccgagatgttaaatacacgctgaacgcgctgtttcagtgtgtccctcagttggatgttgcggcaggatactgctggcatatacgagtatacacatgcgcggacctcaacaaatttgcgaagcataaaaaaatcttgatcttaacgagtgatcttttattggaggaattcatacctcaagcttgattggaaagggtccaccttaaccgcgaagcttgcacaatgatgacaatagtctcacggcagatcgatatctacaggtagcaggcaatcgaattcgcctcccgagtctgtcgcactagacacgaatcacgtatcatacgatgatgtgaagcaactcgtcaagctcaagaattctattccaatagaccacaaagaccggttggttggtgcatcgtcggcggcttcgttgagcatgggatcggatcggggtgcgcataccattttgtcctcctcgctacgtctccagtagacatcaacaagcgtacttacgctcaccgcggatcctggtcgcacttggggcggcatgggtaagggctcgagcgttgctcgaagttccttgagaaacgagctcaatttgtagaccacagattgctcacgcccttcttgtaagagcgattgaaacgtggccgattcgagaacgttgctgatatggaaacctgccaggcggcttcgcaacggtgccgcttcccgaaatcccaacagttccattttcaggccgttgactgaggcgagtacttcgccgtcatccttgggcaactcgtgacagacttcttcaaaccaaacttcccaatcgggttggtaatctacgagtagtttgtagatgtcaaacagtacagctggcgaagctgtgggctcggattccccgtaataatcgtccattgcaagatggcaagtcagaggcgttgcggtcgcgcgctcgcttacagctcgtcgcgattagcgttcatttatatgcacagtgatccggtatttctccacaaatgcccaacggactccgcatcaaaggagttttgataacaagtggcaatacgacgaccggcacagtagcacgacgcccgcgagaaagtacctcgttcactctccgccgtcatctccggtacgcaatgagtgggggatttgtcatgaaagggtcgtgtcaacagcgtacatcgcctacaatacatccgtctagtcggcgtacgatactagatgctatataaaatctgcacgtgcctttcaaaggagcgcgtgcgagtgattttttttgcctttgcttttgggttctgttggggggctgggggttgatggtcggccccgtgattagaggacttccgagacgataccggttccgatggtcttgcctccctctcggagggtgaatcgcgaaccaggctcgagggcaatgtcgtggacgaggtctccgaccatctcgacgttgtcaccgggcatgacctgaagcgcattggtagcacgtcagttgatcgttgtccagcgcgatgacctcacgtcgcactcacgagcttctcgtcagcaccctcggtaccctcggggaaggtcaaggcgacggtgacgtcggtggttcggagaaacaactggggtcggtagttggacatgaagggggtgtatcgaccaccttcctccttggtcaagacctgcggcgcaagtgagtatcagggatcagtctcggcgggaccccgtcctacactgtatgcgctgcgaactcacgtaaatctgagccttgaactttttggccgacttgatcgatccgggaacgacgatgacctgtccacgcttgacctgctctcgcttgacaccacgcaagagggctcccatgttgtcaccggcctcgcctcggtcgagctccttgtggaacatttcaattccggtcaaggtggtcttgagcgagctgcccataccgaggatctcgacttcggaacccttggtgatggttccacgctcgaccttgccggtagcgacggttcctcgtccagagatcgaaaagacgtcctcgacgtacatcaagaagggcttgtcgaggtcacctgtggcgtccagcggggacaacattagctagggacgacgcgggagcgagcggtctagtcgacggcgatgctcacgcttgggcaggtcgagccaagtgtcggcggcctccatcaactccaagaccttcttctgacccctctcggggtccttgccctcgagcgcggccaaggcggtacccatgatgacgggcgtgttctctccgtcgaacccgtactctcccaacaagtccctcatctccatctcgacgagctccaacatctcggggtcgtcgacctggtcgaccttgttaatgaagaccaagagcttgttgataccgacctgcttggcgaggagcaagtgttccttggtctgaggcatctgaccgtcagtggcagagacgacgatgatggctccgtccaactgggcggcaccggtaatcatgttctgcgaggacgagaggcggagcgtgatcagcgacgttcaatcgcgtgtcgatctcccgtcccgtttcgccttaccttgatgtctagaattcagcgacatatacatatcaaagatcagcctcaaaccctcttgtccctcgtcaccgccgcagatctcgcaactcacaatccgagtgtcctgggcagtcgatatgagcgtaatgcctagcagcggtctggtactccaagtgctaccgaacccccgaaaaccgacctaacatgagccggccattccgagtgtacgcggtgacagtggagggaggtgggcttacagcggtggagatggtaataccacgagccttctcctcgggagccttgtctgcacgaccgaacctcgggatcagttccgaatgctgatcaagaatgttgcttcagaggcttaccgatctgggagtagtccatgaattttcccccctgagactcggccaagaccttggtctatgcccaagcgtatcggcaaggtcggccagggtcagcgatgtagatcgagagcagggtgaagcggccggtggtaaagcttacgatggcggcggtcaaagtggtctttccgtgatcgacgtgctattgaccaacgcagagaagagacagtcagtattcgggacgcaagcggtcgattgcgatcgggtaggtggcgacatactccgatggtaccgatgctgtatcacaggacgctccgatcagctccacacacataaagagccttggagaccttctcgaacccatccccccgggactcacttgaaatggggcttggtcctggcaaacttgccaccggcctcggcggcatatccacgggtccacaccttgttgctcaagttggcggcggtggccaaagctcggttggtcttcctggccgaggagaacgatcggctcgagatctgagcgggcttgacagaagccctggcgatctgttgtacagggccgaaagctagccatagcgctcacacggagcgaggtcagtcgaggttcgaatcagaagtgctgcgatcggatgtgagacgtaccccgagccgactcggcgcttcgaagggcgttcctagccaagggggcgatacgggcgtgagacaacattatgggtatactaacgtctagtaacagaggtggagagtgtgactatggtcgtgatcaaaccggtgtgattgatcgtggccaccgacttgatcacaactcgatcgtacttgcgtgaggtggaattggcatagatgcccccccccctccccccttttttcaaatttgcatccgaagccggaacatttcgcgccaaaagcaacatgtcatggagcggacattgatcgatcgaaaaggtcatgtccgcgtttcaggccttgacgttcggaacgtcgggggtgaaagaactacacggtcgacctcttgagaatgattgactgcctcggtaatataacgacgacacgacaggcatccttgcacggacaaatcttgcgaaagtggggtatatccgatgttatgcgatatagatgaacgcgggcgcttggcgaccgaagctataacacgatcatctcctcttcgacctcttcccgctcgactccctttccatgacgacctcttcgacccaatcatccaactcgcagatcttgaactgtcgtcgactccagcccatccgtctggcttcctccctccacatccggctcatgccctttctccaactccagagttcgaccttccatcccttttccacggccaacttgacgcaacccaaaaagccgagctcgttgaattgtccccccttggcatcccccgtacctaggaccagagtgcccggttgaggcgaaaagagcagagtctggaggatttgcaggtggaggagctcgtccacggcttgttcccgcattcgacgggaagtaatggacgggtcgttcaggttgggcagtacgaggggtcgactcggggtatcgctctcggtggccgatccgccagtggtagtctcgtcagcgatgacagccgaggtccaagcctttttcccacccttcctcccgacgctcttgatcgattgctccctgcccctctcctcgctatcgctcgacccatccccgggtcggcgatcgacctcgactcgtttcagtacgcaacacctccatcccatcttgaccgccgaatccaatccctgggtcaacggcgcgctggcgacgaggtgcatgccgtcccgtgccgatcgacgaccacgcagcatgagcagcgagaggatggggatattgaggatcttcttgctaccgagcgagaggttgggaagcgggcgggagacgagcgtggagatcatgccgtggtggatgtttgaactgtgggcccggcgcattagcggggagaaacatgagaccgggatgggactctccaactcactgatcgagaaagacgtgaacgtcgccatactcttcctgcccttcctctaccttgacccgactgacgagcttccctacaccctcttcccatgtgacttcgccctgcttgccatcgaccaagaacctctccacctcgtccctgaccatcctcgtcttgccctcgacgaccgcctcttcgacatcagactcgaccttgatcaacccagccttgacctcgtcgtccaacctcctcacccacgcttcaccctcgaacttctctctcatccggctcgtcatcccttggagcaccttgatgacgcgggggacggccttgacgaattcgatgctcacttcctcgcctgtcgactcttctgccgaggagtggaacgcggcgggaggtacgtagcctcgggggtaccttatcgggttggacccgggcgtgggaggtctacggaggaatagaggaggttctcgttcgaaggtgggaaaaggcgtcggctcgactttgatgtcgatctcttccaaatcggcgacatctgcttcggctttgacatcgatcccgagcttgttcggcgtgatcggcaagggagagttggtcaagatcggcgtcttggcctgtaacatgcccttgaggtggtcgatcaacatggcgccgacatcgtccgaggtctccggagtctcctgcttgatggctcgtgcagtcttggccgggttgcgctcagactcttccttctgatcgagcgccaacagggccttgagcacccggacttgaccgggcgtcatccatttcctcctctgcctggtgctcgacctggcagcttgaatctgagaaagtcggtagaggtacatgtacctgccgagtttgttgagtaggtgggagcgtctagtcgatgttggacgggacgtcgatatcgatcgcccgctggaggcagtggtagtgagagcgaattccggctcagtgacagagatgatgaccggcggttcctctttgacgatctgctcgacctcgtcatcctcgtcctctacgatgaccctccttgcaaaatccctgaccttgaccttgatctcgaccgacttgccctttccttcgctgtcgcctttgtcagtcgcccggaccggccgagctgcagacaaaggaacctttccgttcttctcggtatcgctcgaaggcggggtaagggggaggacgagttgtcgagccaggtctgcctgggcgatgccccgggatttatgcgtcgaggttgttgtagggattggaagatcggcgaacgtataattgccggctagaccggcgagatggcgcggggtgatggacatgctagagttcgtgtgtgcgaatagtgtgatgaggactggtcgaagtttatgcgaaaggtgcctcggcctgtatcagagtttaggtgtagatatgctatagttgtccctgcagcgaatcctttgctagaaagtcgaacgtgatgatgtccgtcgatgagttcttgatgaacgttgcggtggagccgttacgttctagtcgttccgagatcgtaaagagagacgttgtcgagctagcgacgcgagtgtccaagacgtacaaacgagtaatacaagtgcgtgataatttctgcaaatggttgtagcgggtggtggcgtgatctgaactaccgttgtaagttgattgtctctgtgtttatatatgctcgaggtcggtggcgaccgtgggggatgatcagactgagatcgccggaatcgagatcgggtgatcggatgtaaatcggaagaaaatgtcggaagtatatttacatccgagaatttccggctatcacgtgataacacctcattgacttggggactcgagtccaacctaggagagatgatgatcgtgatacatccttggatgcgaagtatagcccatggtacacccgactattggtaccgactatacaaccttgacaaagttcaggacagctcgccatcatgtcacaatcatcacctaccttgcagctcatcgacaaggccgagctgatcaagcaaggcgccgaggccgtgagtccgagccgtgcgagccattctccaccgggtggacagctcatacctgttcgcactctttacagcgagtgtacaagctgcccatctactttcccgaaccctcaatccgctggccgagtaagctgaaaaggctcgccgccgaaaccccacgggcatcaacgtcaacgtcgacgtcggccgctcccgtgcctctgctgcttaaacaccgtttccccaagacctaccgacatccacacctggacgccctgttgacgaaacaacgaatccaatccgagtcccgatctctacttcgttgtttgaaggcagggataacggtccccatgatccgaatggtagatctcgatgccgggatgatcgggatggaatggatcgacgggtggagcgtgagagaggtcttgggtggtggggcagagggagaggaggcggaccccgaggacgaggagatcgtcgatgaggacaaggcgaggaggaggaaagaagccgagggggtcttggacgccatggggatcacgatcggtgcgttcgtcttcccttcatcccggcccgcacgccgcccactgactttcctccccttgcagaggacctgatgacctcgatcggacaaactctatccaccttgcacctatcacaaatcatccacggcgacttgacaacatcaaatatgatgctccgccctgcatctcacgctcctaacgggtacgagatcgtcctcatcgatttcggcttgagctcgcactcgaacgttcccgagaacttggccgtcgacttatatgtcctcgagagggcattcgccagtacgcatccgacgagcgagaagtggtatcaaggggtcagtctcgggtgtggttcgaggccacgcagttcggcaggctgatgtcgggctgtatacaggtattagacgcctacgccaaggggctcggagagaaaaagtgggcgctcgtgggtggacgactagacgagggtgagtctcgccaggggtttatgtgcaacgagtgccagtctaatttccttccactatgcgcatgatagtgcggctaagagggaggaagagggatatgatcggatagcatatcgaaggcaagacacaccttgatcatttgccagtggccgttgtggattagaggttatatcataatcgaggaaacccaaagaaggatgccgtttgtctcgagaacgggaggggaagctcgctactgggcgtgccaatgaagattgacccaggggattccaggagcgcagatgagctatcttcgattacgcaagaacgcatcatcaggtgcggtagacatcacgtgcgccggacagtccggcaggttcaaacgaagacaaaaccccgagactgaacttgacaaaaagaacagacagaatcatccataaaaacgaatgagtatctcgttacacttgtgctgtattcctcaattataccatggtcacatccctcacaaacgttcaatcgtcttggaggcccatggataccatcgctccgtgcggaacaggcgaggatcgtgacgccgttcgcggatggcagcctagtcgaagcacgtcgagtgtctgcctcacggaatgattccttggacacaaaccgcttgcgttcgccgctgcgtcttggggcaccgaacaccgtcaatttaattaacgtacatctatagttgtcgcgctaagaaaagacgcgtatcgaccaatttcttcgatgatttctacaacacaaattcattctcatctagaagttcctccacatccttttcaagagtgaatccttggcgagcggggtgccgtcctcgttgaggaaaacctcctccttctgatcgtcaaagtctcgtctgcgcccgaagtccaggtctacctcgcgcgatcgcacaagctgtgtcttgaacgcgaatttgtagccgaggaaaaccaaggggaacaacggcagcaagatgtaggcgtcgacaaagttgccagcattaaaaggagataatgtcgtccatccttgtaccaacgccaggaagcagcacatgaacaagccaaagtatccgctgaaatacgggtaccaaagcgacttgaatggcaattgatcgaccgtcctgccctgcaccttccacgctcgcctgaagcgaatgtgggtgaagctgatacctgcccagaccaggaatgtcgatacaccgctgagattgacgatgtacgagtaggcggccgcggctccggtggaaatgttcatcaagctcaaggcgccaaacaaattcgttagaattacgcttgccacgggaaccccgaaccggttggtataaccgaggaactttggtgccatacgctctttggccatgtagcaaagagtccggctaccgatatagatagagctattgacggcagagaggcaggtgatgaagataaaggcgttgatcaagtgtacgccgccttcccagccagcctgttggattgcgattgtcatgggcgacttgagggctcgtgattctccgttgaccaggccctcggcgttactaggacacgttaggccaaagaacaccgcactccccatatagatgaagacgatgcgccaaaaaacggtcctgatcgcctgaggaacggcgcgacggggattcttcgtttctgctgccatcaacgctacggattcgactccagagtagactgtaaaagtctcgttcgtcagcagatgacgcacaccgtatgcgatggcatgagtgcttacaggtactgcaaaagacaaatacttgcgcaaccccacggaatccgttgttgttaaacgggcccggatccctccaatattgagctccaacatcctgagcggtgtatacgatgctccataagaaaaatgcgcataatccaacaatcttcatcgtggcgatgatgaactccatctccccgaagtattggaccggcaacaaggagaacgccaagaagaccgtccagaagattaagaaccagccccagattgggatcgcatcgctccaaaacgtcataatggacgtaatgacgttgtattcgttggccaagacacatgcgaagacaaggaagtagttccatccaacgcaaacggcaaatgcgggatcaacatagcgtcccgcgagagagataaacgctcctccagtagggtaaagagtggccatttctccgagagattgcatgatgctcaaggcgatgatcccgatgacaccgaatccaatgatgagagaggcgggacctccgattgccaaagcaccaccagcaccgacgagcctgcaaagaagcgacgggaagaacaaagtaagccttggagttggacgaataggtaggcaaacaggtagcatgctatacccacaagcctggcccgatgattcccgccaatgcgagcatcgaaatatgccgcgttttcagacctcgcttcacacctgaattaggatcgatctcctgaaagtcgctagacgcgctatcagtaaaatcgtccgtaggcccattgaggtaatgcgatttgtccgcttctgtatcatatacgccggccttgtcaggcgagaccgtgggtggtagggtcgccattttcggtagatggacaggagacgatgcggttcaagttgtgaaagatccacaattgtatgctccctgatcgatacggggcgaacgcaaccccctcagcagacgaccaaccatatatatctgatcgcaaatatgatcggattgccggaatccaagaggggaaacctgtgaactgttgctagcccgtaaaatgtacacacgccctccaccccctatcccgcggcgcgccgctcaatttccccctgctcttacgcctcgatcggaccgcgctgaagcacgttttgagctcggcatggctcaattctggcccagactgggatcggaaggttttacaagtcggctgacgtgcgatctcccgaaggtgacgcaataagttcatgtgtcatgtgtcagggccaacgttgcagcagcgcagttcgccggccccagcgtctcgaacgggatcagattcttcaatcaaaaaaatttgatcatgatcgccgagattcgagtttcaaattcatcaaacgccatcaataatcagacgctcggaaatggttgttcgatgcgatccgaggcattactaggcaactggacacctcgttcgaagaaacccgcgcagttgtttcgtcaccgtaggtccaatcgaacagatatacatcaagaacttgcaaggcgggacagcccacaaaacagccgactctctggtgaccaactcgattgctggtgcgccaacctaccgcaatgagcccttgcctcgtacgagcacttgacgatctcaaatctttcccctgctctggacttgaacccgaatccctcgtaaccgaggctcaatgctgttatcagcgttgcttgatatcgcaacggcgagtgactctgtccaacgatcccgatctgaggatcccttcggacgaagctttcgatgcagatttccacgtctcacgtgccacacatgatccgggctgttagtcattacttcataggtccttgtccacaccgcttgcatgtaccggccgctctcccttgtgggggttaacgtcttgatcgtataatcacgatgacgttatagaatggcacgcctcttatagctgttgtctcgatctttgtggaggaaaagaggcactgcagtccgaagagaccattcaaagctctctcgaggacgggagtcttagctacagtatcgaggatgcgaacgatgagaatgggttcatttaggactatcggttgcagatgaacaacgtgaaatgagacacggctgagaaagttagtcacggaaatcaatatgacgtgacgttgcgtatcagccatcgtgtaaagtgacgtgaagatcctcgtcttgttgatcgacctgtccgtacggctggagcggagggaatgacctttgcatcatgaatttccgtcggtcgtgaagaatgcttccgacggactagctcgactggacgtcccggaagcaattactaatctgaccgccctatctctgaatcgtcttcaagcttcaagctggtttaagagcattagctgatctttaccttataactttgatccaaagttgacaatcaaagatactgagacatcctctacatcgcgacatcgtaaaaatgagcgctgaaaccgaacaaaataccgtcgtcgcaaacactaccgacaaacaggcatcgccatgtgatcccgaaggcgaggatctcatgaacccggcgaccttctcgccacccactctcacagtcgggccgaatgtgtttatcgagtactgtgatagggtgagtctgagattgtgatgtcatccgatgacattgtcgagcgtggtcaggtcgctcggtcaacggcgatcgtaagctcttacgatcgtgagctcaagctgatcctgtcaacctggttcatccttctcatcttctcgctgtatagtgtcgatggtatgctttcacctaccgcgtattaccgtaacaacctggtgctgatgatcccgccacctctgacacttcccagggcaccccgagccacctggatccagaccgagctcttcctaaccttcccaagcccggccttggcgagcatcaccatcctcccctcggtcgagaacgctgggagattcagggtctggatgaataatctaccagagggagccaatgtgaccgagggggttgtgaaaaaggaaaacgggtggttcttggtctcggataggaagatcgagggtgggttcccagaggtgagtccgagcaccgtcgagcaattcattcccatgtgtccaaactaagattaatgacctcgctcgtctatcatccagttgaagagcctcaaacaacggatacgatcgctcgtccagccggccagagatttgggtcattcggacgggaatcaccaggccacgacctagtcgggtcggctgcgagtaggccttgcggaaggtggtcgcctggccgtgtacatatgacaacacgataccattacgatgcaagcgatagaaaggctctttgctttgctgcctgccacttgatttcctttcacgtttcggtacttccgtgttgtgacaaactgatcgtctttcaggcccgaccttccggagccgtccatgttatcccgtcggacgtccgttgcggtggcttcctctcctcgattttcgctgtgtcggatgatgccgaagtgttcacagcagagccagcgttgatctctttcgaaaggcttgttaaggacattccccaggccgtcagtaaacagctgcagatagatccatagctttgtgcacctcgtcgtgctatcgtcgtgaagctgatgtcgcccttctagttctcatcgatcgaattcgagattcccgtcaagccgcaagtcgcgtcatctcgctcctcggccatttgaccatcccacacaaacatcagaacacccgccgagatatacgagatatcatcttctcgaagatgaacacccaggctcaacaagaagatccttcgacttccggctcccgtggttacaccgctcaatcctcatcgtcctcacctccaccctcttcgaacaagaggagcagggtcaccacggcctgtttacaatgtcaacgaaggaagagcaggtgcgatgtcattctgagcggaggctgtggacgatgtcgacagctacgaacgcagtgctctttgcgtgcgagcgaaagcgaagagagggaaacgctggccaagctcggtcaatcgtctcgaatgtactcgataggcgccggagcgagcgggcaaggcccagcggccgacatcaaccagcttgaaggaggaccgtacctggaggaatcaagctggaacaccggactcgttccgccaaatgaccgccattcgagacatccggcgttcgtaaccccggactacatagtctcgtctacagacgccgcaatgaacgatcctctggccgatatcacgaaccgcatgtcacgtatggaatccatgctgtcgtccctggtctccgccagcagctctcgaatgtcgaacagttccacgcctcgctccattcccgcgctggacgatccacatccagaaggacctcgcggggaggagaccatccgggctaatttggaatcggtcgaatcgatgaacgagatcgccaaaggtggctgggggagcatcctcgggtgtcttatgggtgtccctgcgaatggctatctggacgtcgtggaaatggggttcatcgacgacaaggagtttgagagcgtctggaaattgtgggtccagtgacattgatgcgacttcctggcggttcgcttacggtcaggtacgcccgctctcgcagattcaaaccgatattcgtcacaatctacccgttcgacatctttctggacagtcggtctccgccaccctcccacgcgctactccgatgtgcggtattgtactacacctggagggcagtctctcccaatacgatcaatctcgacgctgctgacgccaaggaactggagcgtctggtcgaatacaatgttggcctcacttcgatggtggaacccgacgaagaagccatcctcgcacttgtcatcctctcgcagacttgtaccagggagaatgccaagtttctaaaggtcgaagatcctttcggcgcaggcgcggcggctcatcggatgtccgtgacgatcggcttggaggaaagcattgagagatgcgctcaggagccggttgagtacatgagcgaatcatggaacagaccgatgatcgagagagtttgcctcgtaggtcaaatcccttgtgatctcgtgcccttgctcgctcgctgaactggttggatctcgacagtactatgcggtctaccatcgtgtactttggagcacaatctacgtcagcccgaccatcctgcccaagcgtctcgagcacgagtcgcttctctccttcatctcccccatgacggctgtgttcatgggcgatcgcatgttgatacacctcgtatttgaagcgcaaatatttgatctagtcaggccggtcgctgcagaactacgaagctcgaggacctgccggatatacgacccatcgacagatgagaggctctatgcgagagtgattgactctatcaacgggttcgaacgatggagacgtgatgtgactgcggccaagagtgagcattggcattccgcgcagatcattcaggaggaaatgctaagagtccccccgtcggcagtgtcttcgagccctgccctgatactggcatcacatctgctggaatcgatggtattactcaagatcagcatggagcaaaggatgcgactaccttcgcctctcatcgtccagggcggggacctgttgccgaatatgggcggcttgcttctcagccacgccccccaagtcacgcagaggatcatcgcggaccagactgactttgctcgacttccggcacgatacatcctgttgacattgccatgcaccatgatcatcgcccgcgttggcaagatgaaggattcttgggtcgcgacgcatccgatcttcgcctcacttcaagagttaggagaagtcgcgcggctcatgggcaaagcatgcccgcctgcggctcgcctgatagagctcatcaaggccacctcgccccccacaaggtacgaaccgcctgacggccagggagatgcgcaagaagagctgtatcagcgatcgcgccaggatcaaggccatgtcgatgcggttcaacctttgcttgcgggaatataccccccggacatggctgttccggacgtcatgcgagactttgcggccgattcgtatttcggctacccgtttgactttagctttgatttcgacatggctgacgtgcaaatggcgatggctagccatcaagccaattgattaagactgtcgatggatagattcagctgtgcggcgcgcaggtgatacgttcgtcgaggtcagccgcccggacaatagtgatgatacgacctttcctgtaaacggatgattgtacgctgggcgtcgcagtgcgatcgctcgctcacgacattgcatccttatgttgatgcacttcgatcaagcgtctccttgattcggcggagcgttcgacacgatcatcaatgatccaccgagggccggctatcgtctagcgcgatcgctgatcaacggcgtacctgacggacattgatgatcggttgcatatgtccgtgcaggcgggtgtctcctttgttgacaaggagggtcctgccgatcagactggaattgttgcaagccggtcactgtctcagcaggttgcgagctggtcattatcgtctgtagaaggagcttgtagacaaataaacatttcatccttcgtggtgcgcacattagaacgaaccctagatagttcctgtaagctgatcacctgttcgatcacccagacctcaaatacccctatctagctacctcgtacgcgatcgattttgggctggcctggcatcaaagcttcatcatcatgtcatggcctacatcctcgctgtttgaagttcgagaaactccgacttccggccgaggtgtctttgccaatcagcacatcccaactggtacccatcttttgacttgccccgacctagcatacgggatcgtcttccgcgaataccgccgagaggtatgcaactggtgtttcgcctacgaacaaggggatatcttgccgatcagggaaaacaaggccgcattggtctggtgttccaacgaatgcaagacccaatggctgaaggagcatggaggagagctggggctggaggcgtatgcggcggtggaagacttcgccaggcgacaagccaagtctagtgacagggacgacgacacacctcaggctggtccatcgaacttacagtcggcatcggaaatacaaatcgaaccgacgctagatgacgtggaagcagcttggaagatggcggaatcatcagcagagcagatccgcgaagcaagacggtctgctcgcccatccaaacctcagcgtaaagcgcttgcgcgagcactcgaaacgaaactcgagagcatgaccatcaatcacgccatctctggggtactggcatccaagaaccacccaaagacctggatcacagtggaggaactctacgcctctccccagccatacaacacctttgaccagctactggcgcatatatcatcctacctccacctgctcgcactcctgcctcttgagctcttgccgtactgcaacagagacgtgatgatgaccaccctcaacagggactctcacaactcgtttggaatccgatcattggatgacgatgcttcggagatgtttggatttggcacctggccgtcggcgtcctactggaatcactcgtgctcgcccaacatccgcaaaatcagagtaggacgcgaatggacattcaccacggatagggaggtacaagagggagaggagctatgcatcacgtatctcggaggggaggagaaggagctgggggtggaggcgaggcgggaaacgctagggaaagcttggaagttctcgtgcgggtgtaagaggtgcagagacgaggcgggtgaggtagatgacgcgcagagaagactcgagtgatggatggatgcattcggtctgaaaccgcacggacgtgaggtctcggagaccgttcagcgatccgtccctgaaatgagtcactgtcggtccctaaccacaccgatccttcggccgtccgaacgatcgctcgacgaagtggtgctacccgctcgacatcgttctagagcagatgtctgtaatctcggcggcgggcaatatagctaggacaactattattggccgtctcgagaaaagcttcacctggctacagcctgtgcctttcacactgaccaagcgaaccttgatgaaggctgaagaggtggtcggaatcactactgctatcgttgccaaactgtagtccacgacccgtctcgatttgtcagaccttgtgaccacctgactgtgcctcgtcgtagccatgtaaacatcgttcagcacgcttactcagtcttccgaaccggacagcggtcaaggctgccctgccgggccaagacttggcattgtccacgtatgtctcactggcgagtaagcatccactgatgaccctgacacggtgcggctgtcgagcaaagcatcgaaacagttgcgacattcgtgagatgataaattcaagcaagcgcgaggtcgaagcagattcagatggaaacgccctgtatcgctccctgatcaccaggcatcggacacccgtcccacaccctctctctcttaaccgcgacgtgcgtcgacatgtaaatccgatatcctctgatcattgcgtggtgacaacagtgacatctgacatttacgagctcatctcgacgtctcctccggtggtggccttcttgccagcggccttcctctccaagatggccttcctgtcagcgtccagcttcaagttggtgatgacgacgttggaagggtgaatacccatctggacggtggcgccgttggacttgtcggaggtgactcgctcgacgtggatgacccacttcttacggtagacctaggagtatggcagggagggcaaaaataagtttagcctcagagatcctagtctttctgtgctactgtgggtggatcagggactcacctggacgaccttgccctccttgcccttgttcttgcctcggacgatcaaaacctcgtcgtcctttcggatgggcatggatcggacctgtaatcgggacgacaaagccatgatcagtcgaccactcttttcctgctctagcgaatcgacgtcgatcggatcccgctggacaccgccgactgctttacatgcccatccgcgccatgtcaaccttgtcgaccgacgcccacagcaggatccaaatcgaatcgaaatcgaatacgcccatctgaacgcctcgacaagaacaaaaaagagacttacagagtgcttctccctcaactccttgttcaatccagagctcataatcttcctcttgaccgaggaaggagcggagaagtgggcctttcggctcttgcgacggtcgtgagcgatggctatgcagggcaagggcaaaaggggcattaggatcagcgtgaggatgcagagcagggacgctccgcgggtgaagaggattcggagggcaaagaagagggagagtgcgagtggatcgataatggaatggaggtaggagggatccgggggtcggtctggtcgacagaggtcgtgaggaagatcccgaggagactcggaacggggaggttcgtgcggcatagaggtaggcaggcgggtggactgatgtgtaattggtgaagtaggcaatccgacgaccggggttggaaggtgccggtcgtggtcgtgaagatttgctccaacttcccgcttggcgtgatggttgctcgcatgctatcgcggtgattctaatggcagtccggatggttgatatcgtctctagtaggcgggtgaccggttcaaggcttaaatgaagcgtttaacggtgaaatgatctggcaaggaaacctcgtcgaccataaattcgtccgtagatgttgctgctttgtcgagttattgatgatcctcctcctctatgccacacgaccttgatctcctgtgttccgaccataatctcctcgtctccgtcgactcgtcttcgtagacgacgttgctcgccgacctgaccagccgtttgccggaccatcaccgccccttccatcatgtcctcctccgcactctccgactccttcccgccgtatccttctctctcccgggagtgataaagctatacgtactggacatcttgaaaggtcgaatgtgccggtcttttgaggatgggtgaagaaggggaagagaagagacgacgtggacgacagaaagaagtcgacaatgaacgagatgactctggttcgatatggtcggtgagattcgactcgcccaggcaggatcgctgtaccagagaggctcggggcaggctaagctgagagcaggcctgtggtgtggtggtgtggctggggggaaggctgttgcttgctactgtgagggagaagtttggctgacaacctggcacgcgcgggcgagaagatgaatcgacggggaaaaagcgcaaaagacgagaggcagttcgacaagcgcaagtcaaggcggagtcttcggaagcagaattctcgacctcgattccccaagagcgcctggcttcaacggccgactagaagcgcgcgcaccatttttgcgcaatcggcgataattggaaatcagcttccggcagtctcatgacatactcgtccaggccttgcctctcgagacgtttcagattgcatgtttcgcaccgccaagcctgccaatctggtacactctggctcgcacgccgcatgccttatagttcgtcggtcatacgatcatcatcacctctcaaccccatcgtcagccatccatcatcgaacctgaacatgaggtcaagtgacctgtgacaagtgttgtcgacccggcccggtctggttgacattctccggcgctaaacagtcgccggagatcgatcttcgatcaacaagtcgagatgaagcgtattgaatggcaaaacatcgagtcctcggtccggtcgatacgagattcggcatacgtttgacagtctgggccgggtacatatagtccatcatacttgatttgataatgctgtcgagattaaattggcattccgatccatcagtcctagcctgcacgtcaaacgcgcctacgatatgaaactcacactcccctcgctcttgaccacctcggtcatcctcggcagccttgccctctcttcggctaaaccggtcaagaaacaaaccccactcgagcccgcctttgtgctcgtcggggatagcaccaccgccaacaacactgtcacccccaactctggcggatgggggaacgggttctgcgcgtcccttcgaccgggcgtgtcttgttcgaattacggctcgaatggggcgacgacggggacgatcgttgataggggcatctacgcggatgctttgggcagggtcaaggaacaggtcgggatgggaaaagcggtgttcgtgactctgcaattcgggcacagtcagtcttggtcctcgtcctcagcctcgtcctcgtcctcgatccgagctcggctgggagggagatcgcacggctaacgtgcttgccacccttgtagatgatcagaaggtcggaccgcccgagtcgacggctcagaatttgacgaactttgtcaatgacatccaggggttgggtgggaatccgatcttgctcaccccgctcagtcggaggtccttcagggacgacgggacgatcgctgaccaattggccgcttggggtgatggtgagccagctttgggtcgagtcgccgttcggtctcagctgagagattgacgtgcttcgatcccatttcgacgggatagccgcccgaggagtcgccgcagcgaacaacaaccccctcctccctctcctggaatcatccatccactacctcgaatccatcggccaagcgccctctcagctcctcaatcgtctccccgccgaccgaacccatttgaacactggcggacaatacttgttcggccggatggtggcggacttgatgaggttgttcgtgcccttcgaggagaggtacgggacgagcgaaccgttcgtcgtcgatgcccctcttagcgaggctatatggacgggcaagcagtatgtttacacggtaagtatcgtacccgttgtggtgagatttgctaggaatttgctcatcagatttgacgttgcatatcaggccgtctgccccagctacaacgcatccgattgcgaggggatcgcaccggcaggaaccgattacaagcgatgaccgatcgatcaataatcggtcggaactgagtgcacgccgctacgaactgaatgttggaagacgtattgacacttgaatgcatattgtaaaggcgtagggtcacccaagaccctctttcgaaacacggtctatatgaatacgggtttgatgatgacagtcgccgctagtctacatgtcttctttgcgggttgcggttttcagatacttctcccacctgcttcgacgctgcgtctaactgcaccttttggactttgatctcgtcgagtaaaacctgaaggcctgttcggtccgctagactgtgatccggccacgaaaagtattcggcgagcaagacggattgttttccttcctggagatgattgacgtgcacgaccatttgatcatcgctacggtcctcgaattgccactcgttcgccagaactgggctcgatttgtatttaacatggtgaacacgggcggcttccgtctcttcatactcactgatagcattgacctgatcggtacctgacatcgagaacatatcgataaggctccaccgccgagtccagctcaaagatctcggtagcggctcaccttgcctgtcccgcaccattttcttcagcagaccctgctcccgatcatacttgtaatccgtctcggcccaatccatattccaccagtcttcgaggaattcgacaccagtctcgttgccgaggggggcccctgagtgaggtatcgcggccttgccacgcatcgcgaaccaatatcctgcgcatggacccccatcataggggagatctttgaggaaccctacaggacaacgtcgagataggtggtcgaggtgagactggatgtgattagctggggacttgaatacggcgtcagaatctaaagaagcggggcaggtcaggtaatgttcgagaaggaatccggcttccgtacttgcctatgatgattagattatcgatcgaaggatacctccgccacacgtcccacactactaccagcttgcaaaacgcgatcattcggtacccatattccgggtgtttgcagtgggcgggcgaacggacgtccccgtcaccctcgtccatctgtggcgtaacgccgtcttgttgcatctgccggaagcatttcaattgagtcttctctactggcacatttgactttgaaacacaccaggggatccaaggtgaaaagcagaaaggggacgccgatcgatttggcataaaggtaattatgtctttttgcagtcgcaaagggaaagttagacccggacttcaacctcgttttgtcctgaggcgagtctcacagaatggatatcgtccagaatgacagttcagtctctggggaatgaggtacgacaggcatgcgggtgtcgatcatgatgatcgcgacactatctgcgtcgtccagaatctctgctcgacccccccagataccgagaccggcatacgataaggtgcccggtacgaatcgccgatgaccggcgaggctcgccagaaggaccgtcaacgtgaacgctacgagcgagaggatggcgatccgtcggccgcttgatggtgcgactttggtcatgtcgatctgtcgtcagcgtgagtcggtagtatcctcgacggtctccctctggtggaatgtagctcccaggttttcatatgattgcgttcatatgtaagtgtgaaaatacgggttcttcgtggccttctcatcactctatagacccttgtagctgcaattcttctcgagatctcgatcgatcccgaaccgaaagtttacaagcgaacggagtatccatcttgaatctacttattaaactttctgccgtctcgctttccttgttgtgtaggggcatccttcggtccttttgtgaaccgctaactgctcaaacctttctggatcaaaagcgatagtcaggatccgctgatctggaagatctttaatttggcaagggtcggttcgatctcttgtccgtccaagcataatcgcgtgaaagaatgattaaaaaggacccgagctttcttgagatctacaaagatcacgactgcgtcttgattatcgagtagttgatcacagcacccgcattccatccaggtctattgaagactgcccgctgtatctgacaattgtaccaaactgtgggaggtcgtcgatggcatctatctgagcacaacgcgagttcggcgctgctcggcttaactccattccttatctacaacagtctgctagagcttcccaaaagacccagtagtgatccgatgaaacgcgattgtttccccggcccggtccggaaacaaaagagggacaagaaccctcgatgtgtgttcttgtttatcgtccagacacggttctcacgctccggcaattggctctcggcatagacagatgctcgcatggcgtctccggaaagagggggttcttggccgccggtaacggggcggtcaaagttgggtttcaaatcagatcttgttgctgtttgtttgactctctggtaccagaatcgactgctctttacccgtcagggatcagaggagccccttcatctgttcgtggatccccacgacattgtggttggacgactccagagcgtaatgacgcgttgagcttcgatccgcgacgcctccatcgtcactttcgctttttgttgaatttgttgtctcggtcctggctgaagaaatccgctgccgagtagccccggtgtgacaaccggcggctcgttctgttgtcaggcaccacgccgggtccagagactcgccgcgcgccgaaacctccaccccggtctaactgggcacttgtaggcgcctactctcaccaatgcttcgatttccagggggttctttcatttgtcgtgctgacctgatcccatcttctggaacctggacttgagaacattcacgatgataatttgatcatttggtcagttgagcatttgacactactatgagatcaggacgtcaggacgttccagaattatctcgatctggcactcgatccattcgagtagcggtcggatgatcagctcgaggcccctgcttccgcgaggccgaacgcgggtatcgcttgctcgtcagcctcgtcgcgggaccggtggcccagaatcgcagggggtgacgtgagcgccactaaaacgcctccttgatcggctgccaaccgaggaccacgaggattaaaaacgcccccactgacgtttgtgggggaccgatggtcagctccgagacctcttggtatccccttatcccggatagagcctgtgacgacgagtatatataccggagctctcccagacctcaatcaggtctttcttggatgttcacattctgaaaaccaattcaccgctttggcccaagacattttactgtatccctttcttgcctcgatcacgattccatttaacgaccacactactatcaccaatcgtcgactgtcacaaaacctttacctcgaacaaaatgttgaacgcacccaccaagaccttttctatccgtcgtctccagggcctgtgccgaaccaagtaagtctccttccaactgccaaatagtaaatgaccacgtcacttacctcttcctaccccgccccttctcagccccaacgctcctgggatctcgttcgtgcctccctcgcccgctaagcgaccccctaccgctcccttgcgacctaccaacaccaacggtatgacctcgcgggctgctcccatgggcgcttcatctggcaagctcgcttccggcagctggtcctcggccaagtagacgatacttgcctgatggtcgtggtcgctagcgatccgattacggccgttgaccatgacgtttggacacctcgacggtctcccgcaaagcctggtcgggacataccatcacaacctcatattcttactcaactgtatcaccaacaatctaaatcaagtaggaactcggccaagaaaccacctacatcggcgaccagcgcgtcgtctgtatctcttcagaccatctcgaacatcaaagtgaaaccgaatacggaatacgtcatcctggcctgcagcggatgtgtaccaccgaatggaaccgcagcaggatcgaatgtaaactagctagcttgggcaaccgaatgttcccctgtcatcgtatagttctagcgaattgtattagtaaaatacgccttgcagactgtcgaaacgatgaaatgtccattatcgtgcgtagaaacctagcgagttggagcgggactctagtggcgacgtatgccccgaccgatttgccgggaagatgtttgtttccgtcgatcccgatgacgatcttgactctttgaaacgaatattcgttctaacgagctagtgactcgtcgctttattgacaatatcggttcgtccgaacttcaccatcaggatcctgccgggtccgtgcgtcaagtcataccgatgaaccaatgtctatctcgatctagattactaattgctcggaaacccgttatcactacataaagcaggacccacctcaggcttgaatatagaatcattcgttgaccgtacaaacgcattattgttgcttcaagccaaccgccgtcattcctccggtaccactatcatgacgtctcgttttaaataccagattgtggacgccttcacctcgaagccttacagcgggaacccggctggtgggtcgtctttcgagtgcgaatatatccgtgcactcgcactcatatatagacgttgctcatctttgcagccgtcgtcatccaagacggggacgaagcccctaagcagctcagcgatgcagagatgctcaacattgccaagtgggtcctcctgtatgccatctctttctgcgctgcatctctgacggctttccgagtcagggagatgaacttgtccgagaccgctttcatcaccccgacggacgaagccgatgtctttggtttacgttggtggacccctggcgtcgaggtctccctgtgcggccatgccaccgtcgccgccaccgccgtcctctcgtctcatcccaagtacagctcgatcgagaagtaccggtttcaaacccagtccggagagctagtcaccaggaaaatccctcgttcggacggttccccggcgtttgagctggatttccctgcaactgtccccgaggtcgtcgagggggctttacaagacgacgcctatatgggcccgttgaggaccgcgatgggggacaaggcagaggcgatcaaacagatctggagaagcaagtttgacgtgatcgtcgaggtcgacgtcaaggagggcgaccaccttggagattgggctattgaggcgagcccgctggtgagcatctggtggtaaccgctgattcgaggccataggtactgacctcgcgttcgatgacaggccgtcattcccgcccgaggcatcagttttaccgccgttttgcccaggtctgacggatcgggatcgccgcagttccactcccgtttcctaggacctcagtgtggcatcgtcgaggacccggtgactggtcagtccgggccaccttgttacttgggacgactcgatgactgactcggctcatcccttggacaggctctctgcattgcgcgctcgccccgctctactcgcaaaagttcggcaagggggacgccgagctgtttgcttcccaaggaggtgatcgacgcggagagatcagcgtcgtctgggacgagtcccgagatcgagtactgcttcgaggccaggcggttctcagtaagtgatacgctgcccacgttggcgtaccggttggatcaaactgatgtggacatcccttgctctcgcagtggctagcgggcagatggttttgccctgatttgcgagcgaagtagcacttatgagaacgccacacccaaaagttgtaccgaaaagtgaacatgccatcgaaatcgatccagacctatagactattcatgatacaacggtctgctacaacccttctctatatgatgcaaagacgattgtcgcttttcgaattaccacaagtatgggatcgggaaggggaggagaatagagggcggggtgggcacgacggggaatcgtctagatgccttttttgttgcgtcactggacaccaaggggctggccatagaaagacagaggtggaagagtgtccaagaaaacttggtgggctaagagagggggcgtggcttcggatgcagaaagcttctttcgtcctctcatcgacaaaaggctcgaaggagggggacgaaaagccgcttagatgtctattcgaaagtcatcgacgagggtggtgagcgggtggtctcaagagaggacagatgatcgagaactcaccactgtcgtcatcggaaccgtaaaactcgtcctcgtcgtcgtctatcgaggtcatctcgctaaagtcgaccttgtatctgagaggcgtcgaacaatgacatcgaaagaccggtgagccactcgttgtccagtcacatcgacggattcactgcacaagactttgtgactcaccggagaataccaccgatacccgagaatcccttgacgtactggttcccctcctgactcttgtccgtgacgaattcgagcgcacaaccccagttcttgtagttttccgtaaaccactccaacaagctctctggctcggagacctgctccatctcgagccccgtagccttgtccataaacttttccatatcccgttccttggtagccggggtcgagtggacgacgtgttcctcgccggccgcgcttcggaggacgtatctcaacgtgtccagaccctcgaacacgatcaacgtctcgacggcaccgagctcgagcgccttcaaggtgtcgtcgataccgtaacagtacttgcccgtatcctgagcgatctcgtcaaagtacttttggatgagcttcttctcctgcacaaacttgacgtttgccaaagattcggccgagagttcaatggctacgagagggcgtcacgtcgatgtcggtcagcaccgagtcatttccttattctctcaaagcatcccccatcgcagacctaccctggttgaacccgttctcggaaccgtacgagacgtcgacgatcttgacgacctttgcaccgagacgaccgtccaagaggtcactccccgcgagatcgctcttgaaatcggcactaccggccaggacgatcccggtcacgttgaccttgtcggccgtgatgaaatgctggacggcgagctcggcgactttacgcacatagttgtgtcgcttttcatcacgaagacgggagaaacggagcgccgactgtcctcctcgaccgtgcttcttggggaggtcgacggtgaatttgtggatgacctctcgggtgtttccagcaagggtaccgaagagctgattagcgggggtcgcagtgagaggcacgataccggttagcgacggcttcgaacgaggattcaaaggcgctggaggtggactcacagtaccgttaccgtccatgacgatgaaaccaaacttggagtcgctctccaaaagctcggccagagcctcggtatggaacttgttgtcacacaagtacaacgagctgcaggaaatcgaggtcacacatggtatcagcatcgccaccattacgacgacggcgggcattcaaccacggggaaactcacgtgttgataggcttatgaggctcgaaatcgaacgacaccttcttctccttaccctcgtccgtcaagatggtcccgacgaacaggaccaacccattaggaggtacccggttgtacaattttaatcgctgttgcgtcgacgtgatggcggcgaggacggagagtcggttcacacgggacttgatgttcgacgccgtaccgtattcctgggtcaacatgttagcgaattgagagatttgtgactgttcgtcgtgagcgtcgttttatgtgacgagcgatgtgcgacggatcgagtgacacagaggtgcgttttgggagaaaggggacgtttaggtttagctgacaatcgtgcccccggcgtcgacttcccgggactcgccttggggggaatgatcaaactgatcatactcgtcccggcaccacgggcggaatcgagctgtttaatcaactttcgggtcttccatagctgttgtcgaccggataaaaaaggggagaggagatcagatacgggaggtgtgtgtggcaaaggcgtattcagagcaaggctagctcacctgaatgttttgctcggccaagtcctgtatcgatcaatcgaacaagttgagcattccagttcttatgagggtgtacaagctgccatgtaggcttacgggttgaggggcggacatgattgcgattgtctgtagctctggcttgttctagtggttgatggtgatccgacgtcttccgttgtttgtacgagaagaaaaagtctctatgaattctagattttggctgtacgacgcttttataaggctgtcaatcaggtatagtcagggtttcgctatggtgtgtatagatttatctattttgaagatctagatggtggtctttaggttttgagaggctgaaaggtcgaaagggaagtaagagtgtgatcaaagaaagatgcatcaggctaaggctggaccatggctgggaatggttgatatccgcggtacaacactttatctttgatgacgcgcgcgagagacatctagagcgtggaggggggccaggctaggctaggctaggggggatctgatggatgatgtcgtagagcgagcaggccggatgatggtatgatgctcatgatgatcatgatgatggcgatacacgacatacacatcgtatacctgcccgcctttgaacgaatcgactagtaacgaatatataacgaaaacgaaatgttcatcatcgtgagtgcaatccggccagtgcaacggggtcgaaaggaactctgcgcaccaacgtcaacctcagaggcgttcagagctgacggaatggtatcgaccctctccgttcgaccgggtatagaactggctctgggacgtattggcctcgctcggtgagtagtcgctttgcacaggatagggccgttgctttgaggaggaaggcaagctgtgtgaaggagaacgaccaggctgaccactcgctgcgctgccctccggctatcacattacatcgtatgacgttccaccctgaacccaggtctcgcaaacaagagtaagccccggactctcgaataacaaccagccatctcctagcaaggaaactttgacctgattccgtttctttgcctttgactttaggtgccaagctcctcttcctcggtctcgacaatgccggaaagaccgtgagtcctcctctcctcctacccctcctttcccgcatcgcaccctccgtcccaatcttcagccgtgttcaagctctctaattgtcccattctcatcgtcgtggatactatcagaccctcttgcacatgctcaagaacgaccgattagccaccctccaacccacgctccatcccagtgagtccgcgtacacgcttcacgtcgggagccctggaatagcaagagtcctataaagagaggacgttcaaggcgtactgatgtcgagtgcatcgggcttgattcgcagcttcggaagagttggcgatcggaaacgtcaagtttacgacgtacgatctgggtggacatcaacaaggttagtctttcgccctagatcccctagacacacaaaccgaaacatcggatcgctgactcatgctacctcattgtttgcggtccgacagcccgtcgtctctggcgagattacttccccgaggtcgatgggatcgtcttccttgtcgactcggccgatgtcgagcgattcgccgagagcaaggccgagctggatgccctttgtacgtcgcgctcccacctccaactcgactgatctccccttctcgacatggtcaccctggctcacctggacacgcatcacagtgtcgatcgagtcgttgaaccaggtccccttcttggtcttgggtaacaagatcgacgcacctggtgccgtcagcgaggaagaattgaggcacgaattgggtctctaccagaccaccggaaaggtcagtctctctctctctctcgtcctcttcctcgaggaatcaccggttctttctggcgtcgacgctgatacccgggatacgatcgcgtagggcaaggttcctctcgaggggatccgacctatcgagttgttcatgtgcagtgtcgtcatgaggcaaggatacggggaaggcatccggtacgttcgctatgcaaactcggctttatacgctccgagtcgatagctaatgggttggatgcgaacggggtttgacagatggatgagtcagtacatctaagcggaacagtggtgcccggccgagttacaggacgagatgggcaggaggaccgggcagcaagcgggaagggaggccggatcagctagggatgtttgtcgtggcggtctgggtcgtcgatttctatatccatatcattcgagttctctcgcccgagcgcagtaactgcgagatgacgcggtcgttcgatgaatttaagtttgtgggataagtggaatcgttccgcttgtgggccccgctcagagcggcaaagagcccgtttaaatcgtgcaattctttcggttgtcgactcagaggagggaggacatggcgagcttgtgagcgctgggagagaggtcaatgctgtaaaggagactgacggcgatcgtcatgtccctctccaacccctaccggcacgcttttcgtttggcaacactgataccaggctgtgggcctcgcatacaagatatcgagcggtggtccagctacaagatcaaactaggctgtctcgctagcataatcttcctgcgctctgcgtccaattcatgttcgagataacccatcctataaggtgaatgagaagcaggggaaatcctttcgtaccgcagaattcgcatacagttggttacagtgagcatcaggtgaatccccacactaagcacaacggttccaggtcgaagtatcaatccccttaaggaaatagacatgcactttactataacgatccgtcatactaatttcgctctaaggtccttggtgaacaaagctggcatcgcctgtaagtgaaacgagcgggtgaatcgcaagctcgtcctcgtcatcggctcgcgtaagtcggcagctcggtcggtcgcgtgaatgatggtccgcgcggggacggaggcgcggcagaaagaaatgccatggcctatccgacatttgtttcgtcgaccgattataaagtcgggctccgatgctcctccgattgtgttggctcgctacactaggagaacccccgaatcttcatcaaatttgattatttagtactcttactcgaacgcatgcctgccgccaccggaaccaccgctacggtcaccgtcgaagggcgatccgtgactttccccactcagctctacattggagggttcgttgattgcgttcaaagctcgcatcgattggatgctgactttgttgggctacagggaatgggtcaacggtcgaggcgatgctctggaagtgttcaaccctgccactgaagaatgtgaggcggctgaatctgtacgagctgaaagcaaacttaacgcatctttgatctccttcagtgatcgctacggtacatacggccaccgctgaagacgttgatgatgccgtcaaagcggctagtaaggctttcgaaaacacctgggggctcaacgtagccggttccgagcgtggaaggctgctgtacaagcttgctgatgtaagtcggcagggcttgccaggacttgacacgagagatcggggctgattttcatttcggctgctatgtataccaggtgatcgaggccaatatggaggatgtcgtgtcggtcgaggcagctgattctggtaaaccgtatcaatggagcaagcttgacgtacagaacggtcagtgtcattgcccgccgcgccagtcaatgtggtgcatcatctgacgtgttgatcttaggtgtgtctgccatccgatattacgccggaatggcgggcaagatttccggttttactgtcgatattggagagagccagaaacaggtcgtggtccgcaaagaacctatcggtgtcggtgagtagataccggggaactgtgcattttctcatgctaaagtttctcggacagtcgcccagatcaccccgtggaattttccgttcatgatggtgagacttccccgctaccagtgtaaatgaaccatcgtttatcaccattacacagcttgcatggaagcttgccccagctctagctggtaagctcacgatttcgcgatccgcctgttagcacataaggctgacacacacgtcctcagccggttgttctgtcgtgtttaagagcgccgagaacacccccttgcacgtgctgattctcaccaagctgatggagcaagtcgggtgagcattttgttcgacactgtttcaagaaacaacaccgcccaagaaattgatcgtctccatccatcgcttcctaagctggcccgctggtgcatggaacgttgtgactggcttagggcccattgctggacaggctttggctgatcaccaggaagtccgaaagattgctttcaccggttcaagcaaaggtgagcttgccttctgagcttttgattactgcttccggtgagttgacggatctctctcatcctttccggcagtcggacaacacatcgcggcatgcgctgccaaatccaacctcaaaactgttaccttggagctaggtggaaaggtaactcacatatcgttgctactgaatgattcacacgactcatttcacgattctttgcttacagtctcccaacatcgttttcccttccgcggacatccccgccagtgcgcgatggagcgctttgggactgttcgagaccagtggtcaatcctgtacgttgggaacacaacgtttgaggacgatctcccgctgaccgtacgctctggtgatgatttgacaggcattgttggctcgcgtattctggtccacgagtcgattcatgaggaattcttggaagagttcaagaaggtcgttcaacaaatcgttgtgggcaaagatcccaaggccttctacggcagtctcatatcgaaggttcagttcgacaaggtaatggaatacatcgagatcggaaagaaggaagccaagctggaacttggtggagcacgccacggagacaagggatactttgtgcaaccgacggtgttttcgaacgtgacaaatcagtgtcgaatcgctcaagaagagattttcggtcccgtagcgaccatcatcaaattcaaggatgaggcggaggcgttgaaaatcgcgaacgacactatctagtcagtatggccggattgcttcggtaccgatgcaaattattcacgctgcgcccttcttcagcggacttgccggtgccgtacattccaaagatcacggtacgcattgtagctttcctgactggcgtgggatcccactaaacccgtctctcctctgaattcttaggccaaatcatgcgcgtttcatcgaaaatcagagcgggaacagtatggtgcaaccaatatgctgcgctcgatgtacgtactacgtctgggtctggacattggcgtggtgactgatttagagcttcgttgcaaaaagccttccgtacctttcggaggaatgaaacagagtggctggggccgagaattgggtgcggcgggattggagaactacctgacgaccaaggttggtcgtttcatctaagacattaaacaacaaagcagcgctaacgcacgtatctttaggccgttcatcattactacggggatgcccccaattggcccatggtactctagatctgtcatctcgacatcgaatcctgtgttgatttgcagaatcccaaataataccgatgtatgcgtccgcccgtatgcctcgaaacctccgagctcggcttgttcagagcggagccatggcatgggttctcagatttaaagctatctcatctatcagatgggacgtttggggcgcctatggggtgctggtccttcgcccccgtactacgtaggtcagtcagactgacaggtgtccttctgttggcatgccacactcggatggggatcttctcgtccttgttccttttctcatgagatagcttcgatatatcgcattggattggctgagatcacagatcagtcttcaggagcggctgccgcgggtgcgtcggacgaggttcaatcctcctcacgatcgcaaggggcacagagagctccacacaggacggagcgagggttatccgagacaaaatacaattcgcggcgatgtctcggggatccacttcgatgacagcaggaccgaaacattgtggcagagcgcgggatcgccaacatggcacccagtacacagcgcgtcttgagtatttacaggcttgaccgaaatgaaccatcatctacatacaaccttgacgtttcgaattgccgaatacacatgtcgtctgtcttaatgtcgaatccactcaaacgggaccaaacccgccagggctagcaaatagttccaaggtgtcgaaccaattttgaacctctccatacgatggcattgtccctcctgccgagcggggccaatttggagtcgcaccaccgaagggtccctgatcggctagacgtgcaggttccggcggagtcacatcatactttcctatccgaagcgcttgagcgccggtcttcttcagatccagaaggaccgacaccgcctccgataaagatccggatgctggcgagttgtgcatgtcgacggcgagagagtgccatttgcgttcggctcgtagcaagagatggacgtaatcgtctgtccgttgttcagatcagacgtagtgcaacgaggacccgaccaacgagacttaccagccagctgccaatgcgctgccatggccttcatcgaacccaaaatgaccttgaactctggttcgatgttaatttgcgcaccgagacaagagttgactgttgcaaggctgtcagtgccgcaagtatggtaccgtctcgaagatgctggactcaccgaagaggactcgcgctgcaatccagcaacaccagatgaagatgggagacacgctcggagcggccgaatcgaaagaagcggtagcgcggcagctcaaggtggtgatggccctcgccgatgctagacacgcagtcgcatatggctcaacaatgctcccattcgttgctaatgccgggtaggcatggaatgactgtagcttcaagatcgttctggcaaagtgacaatgcgaaggcgtgtgagcggtcggatcgcaagacactgcattgaaccggacttacgagtgatatataccatgctgaaatcatagcaaccattgtcagcccatgcaattcgtatctacctagcgcgcgactcacagtcaagagatccaaaggcgagatgggaccattatcgtcgaatctaccgattgcgggctgtatgtcgagataccatcgtgttgcagcgctaacaatggctgccgaggcgtctcgccgtgtttccatggcccgtgcgtcctgaacatctaccgagcgtgattgtagcgcatgggctcgacccatcaaatcgagcgcttccacgaaaaatgcggctggatgcagcgtagctagagaagccgagtttctgccgtaaagattaagcggggatatgaaagtgtctgccgtatagtactcctgtttatactggtcagcttgtgtaagctggcgcttctgactcgaccgcagactcacttcaccattccatagatcgtccgcacaaggcaatcgcctccggatgtcctgagcaggtatagcggtctcgatagcggtagtggtgcatgtataccggtcgagcgcaaagatcaaccagaaaagtcttcgtcgggcttcgtcttccctccagctagacggactctgcaatatcgatgtcttgctgagtgcactcgggaaccggagagtgccagatccgctagtgtattgaccattgttcgcctcaacgttgtctattcccgcttctcggagcagatccgccgtcaccgctgatcgcgtcaacagagagatgcatccccatccttcgacgcctttcccgctaccgatgacgtcgatcgacagtaacgcgagcgcttgtaacgcatcaaaggtcagctgttccatggcttccagataaacgtgtcttctggccgctgtatggatctgctcccggtattccaagactctgttgtcctgcgaaaagcgcaaggacacagcgactataccatggacgacaatgttccacggcggttcccagatctcgccattgcgtgggatgatgatgaacgttgatggcgcaatcttgtcaaagtatacggcaatgagatcctgtacgatatcgtccctgggcagggccatacccggggcccaaatcggtgcatcgtatcctccatagtctcggtattctttgttatcttgtgtaattgtatattgcggttgagactgtcgatttgccatgaacgactgtgtgatagatcatagtagtcgacagagaacagactcacactcggctctccggacgagatcttgccaggatgcgagtcgagtcgagtcatagggctgatcgcagcggacatttgcctttgctgcatcgggacgttgtttccatcgttcctaggctggtatccgaacattgggtcgacccccaactgcactccagacggctggttcagcctattactgttgtgagagcttggtggtcccatatctcccatagtaggctgattgttgttatataccagcccgccgatctgcatcccgttgctctgctgcatcaagctcggcggcatgcttccagcgccctgaacgctcgagccgacgacgcggcgccagcattccaggtcattcacacgtcgttcgttcatttgtctgtatctcgtaaagtctgcttctagtgattctacagaagccgccagtagacattattaggatccctcagggaaatgcaccgggacataatggacctggacgtaccgatgcgccgtagcatcgtctcgcctgttccggctttgagacctggcttctgcttcgccaggtatacacaatcgtgtccagctctgcaagaatttgagatatgagttgcagatgccgtgagcgacaggacagtctgctcactttacgcaatttgtgcaagcaggttttgcattgtcgcactctgtgcgggttcgcgttagtatcgcatcggggacaaaatgtccttggggcagacctgctcactgatcttgcgagatctgcagtgtgtgcaagttacggctagcggtcttccagaaccgaacgcgatgtgaagcaggtattgagaagtcacgggtgagttgtgaacggacgaccaacacgtagcgcaactgaccagacctaccgaggggactgttccctcttgactctgtcttgcctggagtcctgatcgcggaagtgaccattcgactcggtctccccctcgtctgataactcgtccctgtatccatcgtacttgactgatgagctcgagccagatctgagacgcttgaggggtgggccgagggaagatcgaaatgaggacgacatggcaggatgttatgccgaggcaccagatcccgcagtttgaccgggaaccaaaaggtggacttgatcttgcgcggttagcgtgcctgttgcagcgctatatctcgaggttggaactatgatatgcactcctgggaagccgtactagaaggtctgctacaaggatggtctgttcccgtttacaatgattatccactcggtggacgggcgtcgatcacttcggacctttcggggtgaagatgtggtttccggataagcccagacctgagaccgcaggacgcttcgggtgcggtgcaatcaacttcacggatcgatcagttcaatcaatccggctacacctttcattctacattcctcgagtatctggagtatgtgcgagcatataatcgtattgaataggtcatcacttaggcgtgtcgtcagtcgcaaatcgaacacgaccagaaattatatacgcgatgcggacgggtcaagtttgaaactgcatacgtgtctaggcagggagcgaaaattaaaagggaaacggaggtccggctgcaaatcagatcaagtgctgatgttcctcatctggggcgcttcgctcaacgtgaagcttggcatccgtatccagttcggcgtagacgttgctagcttcgacctcctcgccgttgatcctggcgacctcggcgtccgaaacaccaaattggtccttggccagccagatgatgggctgaggtttccaggtagcagggtggtcaaaggccttgtcatgccagccagtggtctggccgtactctgggccggcgtcaccgtcctctcgctcttcggcggtgggagccaaagccaacttggttgtggaggcggttccaccaatcaatgaagaagaggtgtagaggatagactccatggggaatcgacgcttgcagtaaagctggaaggcgatggtgcagacaccggcaacaacctgaagggaagtacgcaaggaaggtcgtgtcagcatgcgcgaaagcgatctcatgtgattaaacttacgaaaagaacaccgccagcaagaccggccttggatcgcgagcttccatcaggaccggtgctcaagaagaacaatccagcgagacagatctcttccaggtacaaagcagtgaagatggtgttcaaggccctggggtagtaaagaccgccagtctcgagctgtttcacatttcagaacagatcagtttaggctaggatgcaagagtgatcatacatgcttacctcatcgggttggtcggcacaccatgcaaggacgtatttaaaggcgaaccacaagagggccaagacaaggagaccaacaccggtgatgatgggttggatgaccgagtagacgataacgatgacaatgatgagggcaacaggaggccaaacgacaccgaatttgagcgagtcctataaacgggctggttagacaactcgtctcgaattgagagcgatcagccaagttggctcaccatcttgtgctcggagagccagaatttccggggagtcttgcctcccaagatgggcttcaacagatgcatcacgaaggcaacgacacgcgagtatgtctttgcagctcccgccaagtttcgggtcaacagcctgagaacgcgaacggccgtcaggccctctgacacaatcagaagctcaatggtagggaactcacaaggtcaagaagaagatactggcaccaggcaattcagtcgcgagaagagctagaagaggaaagaaggcaacgattactcaggaaccaacactttggaacggccgaaaagttgttacgtactggtgaccattcccgggttgtcaacaatttgaggaatagcagacatcaatccagaggcaacggtgacgaccaggaaaccgttgatcaactcaaaggcaaagaatcggctgaagaggttcaactccaattcgctggttcgaacgataccctgcttgttcaagcagaacctgaggaagacgggaaccatggcgaacaagatagcatagaggatggccggcaaaacacccttgatgattcctagtgcaaggcagacaggtcaaagtcagctatatacccgattctggtatctcgacgagggactaaccgagcacaactccggggatggtacaaagccaggcaagccagctagcttgagtgcacaaagtgtcaatgttggatacggctccaacgaaagccaggagagctccccaaataatgatcaacgtgacagtgatggcccagctgataatggtaccgatctgtcgctggtgagggttcatcgacgtgttgttccagatgatgtcttcgggaacgacttcgatcgaggtcttgatctttttcctgctcttctccttgttgacgtttctggcgaagacatgggcctcgttctgggtgtggaacctgcgacgaagcggaacccctttgatcagcattaacctcgcgtgtcttcaaccttggctggggccaaactcacctgagccaagcgacgttgccgagttcgagggaatcctgcttgctcctgagcttttcaagttcggcgttcttttccctgatgaaggcgggactctgctgcctgtccatctttctgccgatcaagcccaacagtccctgcttccaagtgatcttgcccttctccttgggagtgaggtatcggtcgatcacagcatcggcatcagctcgctctgtgtccatggggctgttcccagagtggtgagtgggcttctcgggggtcttgttcttcttgacgttcttggtgatcttggcgagcaacttggcttctccagcctcgagcctgttgcattcgtcgttgcggtcatcaaagacctcttggagatccttggtgtccctagccaaccaaaccttaggagggttcctctcggatgcaccggtgaaagagctggcgagctgggtaagggcagatcccgccatgaggtcttcgggaacattgaccaattgaacggtcctggttcgggcaagcttctggtgggtgtgagacgagagccaagcctgtcggaccttgataagatggccgtactcccggtagatcaggaaacaggtccaggctgcgtagaaacaagaagtgtcagctggcttttacggaagtctatcaaggtacatctcgctcaccgatcaagattagtcctacgagcaagtgagcaatacgcttgttgggcgactgcgggggtacatttccgatagagaagatgttcaagtcgacgtttccggcagtaggcttcgtggcactgcaaagggaagcgattcgacgacgtcaggtcgtttcggctattgcgatctggcactgatactgacgttacgggcatcaggatgatccaggtcaagaggaagtaagggaccaacatccaaataccgaataccttcatgaatcgaatgaagaggtaggcatcgagaccgttctgctctatgaccagttggtctggtgtttgaatgatcgactttatcaatgcaaagcctgtgggaagaggaggaggtcgtttgctaccaaaccggcaacggacgaggtaggaaatgtcagcttctcgaatggacgcagcacggccaacaaaagactaacccatccgtagcaagcatgatacggctctcgtacactcgcttgtacttcttctgaagcacgaggaggacgagaccgagagctccagcaacggcggcaccgacgaccaacgcggagatctaaggattgaggccatgttctctcgtgagatcgccgtcctgtaatcgagcacagacattccgttgctacgtacgaactgcgccttggtcgcggacttggtgtcctcattggctaccgacatcttgtagtctcgatcacagaccggttataaggtatcgctatcagaggcgaaattcgaccgaaaggaatcaactatctcggccgtcttgtcgctcaagctagagatggcgtgagtactaggtcgatgagagcagagtcgagaatcaacaatgcctatggttcgagaagcagtacacaagacctctgcaaagcgatccaattgcatcaatcacaagcacctcgttccttatatacaacagagccaacaggcagcaggcagcggacaagcaggacaaggcaaaactctctaaggttgtgatcgcgaaccgcgactcgctgggctcgctgcctgttgtgctccttcgctgcgagccttcttttcatgacgatcatgcacgcaaacgaggggggaatcaacaaaggacccgatggatccaccttcgatagaccgaggaaagcgtgggctatggtgtaagcggaaagagagagagagagagagagagggtctcaggggcgggttgacatttcgacacggcccagagagaaaggatctcgctcccacccacggatgggatgggatgggatgggatgggtgttcgggcggtcagttcgagaggtgggataaagtcgaggtcggtatcgacttacgatatggtaaaacggagtgttcttctgaccgtgtcgtgcgagtcttatccgtaccgtcatcttgaagctactactaggtcgtcaaaacgatgtgatgtgctatgtatagggaaccctctatgagtactcaccacgaacaaggtgtaaacgttgaccagattcaagtaagtcgtactcaacgagtgttagttgcgagactcggttgatggttcaatcacgtgaaaaactcggcaaagccagacccagagtcacccgggggaggttcaatgtgttatcgatcccgatctttgaccatggttactactgactgtaacccatcagcttcgctctgttcccatgggatcatccacttgaccagacgttcgaccggctacggatgtagcgatgatccctgcgagttcatcgagggagagtcaaccatcaactaccgaacccgaactcgacgacctggactggcccgaactgaggcgggatgacgcgatcgttcccggtgaacagtctttcaggtcgaggttggtaaagccagtccagtggagcaaggacatgaagagcgaagaagaggtctatctcgataaccttcgtacgtaccccgaacggttcgaatcgatcggcgtaccgatatttcacatcggctgaccgccgagactcgctccccctcccaacggtttcacatagacctcaaactagaccgagcgcagaaaacatgggttccatccacgatcacgacagaacaatacgacagatcattcggtctcgcagccgctcgaactgcttcatctggtggacgacgtcgaacggatcgggacgacgtttctatagcgcccagcatttccgacgatgacgagctcgaacccgctcatggtcagcaggaaaaccacgcggacaacgacaatcatgacggtgacaccgatgatgacgaggaacgacagctgggtgatgtggctgcgacgacagaggaaccgaacccggcggataaccctggcttgccgttattgtggaacatggccaaacggtccgagtcgtctccgaggaccttttcacctgaaccgcggggtgaagctgatagctctgttatggataagatgtcggagtcttccgatggaccgaaccaggatgtgaacatgaccgagcacgtcgagttggtaaacgacgaaggggacgcccaggagaaatccgctgctgagctggtcacatcgccccttcgcgagtccccaccttcttccccctcgcccgctcccgggctaccgcccggcccacagcaccgtccatcggggtctacctcgctttaccccaaaccccggctcttgtcgagcgatagcaaagtcaggttctcaccccgcgtccgcgtcaagtcgggccttcgaggcgggagaacggggggtagtcggatcggatcccgggtgggctcatcggccagcgtcccgccttcagagggaggacggatggagcccgacccagatgacgtctttgcctccaagggttcgaggtccgtctctgggcatagccggttgggggccatgacgacgctggacgatccacctccttcccgcccgacgtctcatcgaaatcccagcttgaccgggttggaatccacctcgctcacctcgtcggcgagcatctcgttgtgcgcctcgcctccgcaacattcgtggttgttttcgggcaacagtctatcggccgctctggcaagtgtcaacgggaacgacgatcgggtcggcgcggcttccggtgggacggattacttttcttttcccggtgggaccgatcgagatgtcaacccgacgacaacgacgacggcttcgaaccctccttcccgatcgtcctctttgttgctcacccggggaagaggatcgaccctcaccccgcgagaccccgagatcgagaaactctcggccgatgccgctcgaaaccgagccgagagctgggcgagggaacatgccgcacggtccagcgtccttacgggtacgtctggcgggactcgatcaggtggatttcagacacccccgttgtattcccccagcttcgagacgtcgaggcggacacccagcggagggatcctcatccggacctacagcgggaggtacctccctccctcgagcatgaacgccaacgaggtccactacaagaccgaacaagaggtcatctggggctcgtactgggatcgagtcaggaacccgaaatggtggggctggaaattgatccgagggtggaagttcctcgtcaagttttggtgttcagcaggggacgaggacgaggatgggctggcagaaaggaggttgctttatcgtagacctcgatgagagagatgcgggcaggtgagcgggctcatcgtgctcatttacacagagttgcgagtttctacggacgtcaggtgggagttcatgggtgccccgtgcgattcaactgtatccgttatacagcatgtaatacacgaggaaagactttacgcatcgcatatccaggtatggatccgttcgatgatacgatagtcgacagagccggcaatcctgtaaattcaaccgggctctaccagacatttctttatgctgaaggagcttaaacgtcacatgcgttcgaaaatcctggatgagagcgatttctcaacgggttttaccatccaaccttgttcggcgttgttaccgggttttactacagatcgtatcatgacgatgcctggggcgcacttctcgccggtcccgtttgtatccaggctccgggcatccacgatctctgccctgattcttgcaaagaccaagagcgccagcagtggaaattaacgagcttcttctcttgctcggctgtctgcgtcgtacccgcgaaaccaattgtcgtaagcacttgtcagcccgggattctcagtcgtcttggttcacccacaagccgactgtacggatcgactgagggctcgagctacaagaggtctgtagcaactattaccatacgtcacacgacgcccgcttctcctcggcacgatactgcatgaccagccctgaacagctctgaaagatcttggccgaattccgacctttagagatgcggcgcactcttccgcaggtacgaggtggcttctcttatgcgcttgtccggatgtatagtttgatccggcggtgatccagtttcgcgcgctaaccagcgggatcgaaatgtgtggagggtgatcgatctatcatcggttattgcgtcaaacgggtcatctcgagatcgggatcactggatcactttggacgatatccaattcttgcccgagacatgacccaagactgtaggaatccacgcaagattcgaggggaaagttttgcgtgcatctcgacctctgtacttcctgatcgccctctgtgcgttcggtcgtatagatggtagttgcacagccctgttcccgcgcggtcgtcggtgttggcagacgattctctgggtatgacgaccgtctgtcaagattagtgctaatgcgccaccccgtccctctcttgcggaatgtgagtacctacagcactgagaagaggggtcatgtgctcatgtgaatctcgagcaaggccaggctgagcgtttcgtgcgaagggcggagaaatgaatcgattagcgccgcggctcattctggaggaacgacacccgaacaccgaccgaacgacgacgacgacgacgcatgacatcgactcgctttcaaccgaaaagtccagcgagtcggaaaatcagagaagaaggatatataagccaatgttcgagctattgagaagtcaccgtatggcccgctgtacgacctgcattccagacgcttcctgacctgctctacctagacgcgagcaagccaagatggtcttctctaccagcctgctcgtccttgggctcgccttgttgagccagacccaagcccaggatcaatccgaccctaacactcccggatcaggttcaagcaatccgggaacatcgaccagtaacaatcagacggccgatgcgtacgtgcctctgttctctaaccacacaaatcccttgtggaaccccaacgcgaccgatctggggccttactcggtcggagtgaacaattcgtactctccgccgttcccctggggcactactagaggttccgggtcggaatggtcagaagctatagccaaagcccgcgagtttatccgcgtcaacaacctgacggtcgagcagaaagtcagcttgaccacagggttgggctggcaagggaagggaaccggcggacgagcctgcgtaggtaacattcccgcgatcaacggtacgaattggaagggtctctgcttggaggacagtcccgcaggggtcaggttcgccgatggtgtttcggtcttcccctcggggatcaacatcgctagcacgttcgacagggacttgatgtacgcgcgaggcgaagccatgggcaaggagtttgtcggcaagggggtcaacgtcgctctgggaccgggtgaggagatcagacctagagtgaattcgcaatgaggctcgacgctcatctgaatttcttgtcctgtaggtatgaacggagaacgtacccctaatgcgggcaggaattgggagatggccggtgccgacccctatctcgccggagaggtcgcctacgccagtatcaagggtatgcaatccgccggcgtgcaagcgtgtgccaagcattacatcttcaacgaacaagagcggaaccgaaccaccagctcgtctaacgtcgatgactacacgacgcacatgcattatctgccaccattcttaaaggcggtccaggcggatgtggcgagtgtcatgtgtagttatagtaagtgatcgaatgggagcagtgatgatgaagcatgacagactgaacaaatctcgccattagaccttatcaacagcagttatgcttgtcaggtaggtcgggacaaggaaggagataggacacgacggacgacacttgactgaccgacctcgtcctcgctcgcccctacagaacgctctagcccagaacggctggttgaagcacgaattaggcttccagggatacatcctgtccgattgggcggcgacgcatagcggtgtcgactcggctttgaacgggctcgacatgaccatgtgagcagagctatcatatagtttatatctctttcgcaatctcacctgatgtcctaaactacaggccaggagacgtgactttcggatcaaacgatagctactttggcgccaatttgacggaagccgtgaataacggatctgttcctgtagagaggctggacgacatggccacacgtatcctcggagggtggtacctcttgggccaggacgacgagtctttccccgacgtcaattttgacgcgtttgagcgtaacaacgacgagctgaacgactacgtcgacgtgagggaggaccacggcgatctcatcagggaaatcggagcggcatcgagtgtcttgctaaaaaacgtcaacaacaccctgcccctgcacaagcccaggacgatggccgttttcggttcagactctggccccggcactaagggccctaatggactgcccgatcgtggtggtttcgacggtgtcgtcaccattggttggggaagcgggacggcggatttcacttatctcattaccccactcgaagcgcttcagaaacaggccttggccgatcgaactcagttctcctggtggctggaagattacaacttggaaggcgccgccgccgctgccatcaacaaagacgtcgcattggtcttcatcgccagtgatgctggtgaagagtacattaccgtcgatgggaacgtcggtgatcgaaacaacattaccgcttggaagggtggcgacgatctcgtccttgctgtcgccaagtaagggtccggcctgcgcgcggttcattgcccttccgctgacctgaaacgcttcgcgaatacagcacgacggataacgttgtagtggtaatccactcgccgggtgcaatcgacatggaggcttggattgaccatcccaacgtgacagccgtcatcatggcagggttccctggtaagctctttgcaggtatgctcacctatactgaccagctaaagtgatcgttgctctgcaggtcaggaggccggtaacagcatcgttgacattctttacggaaagtacaatcccagcggacgattgccctacacaatccccaaaggcctggaggaatggcccgtccagatcgagttcatcaacactgacctggatccccaacctcaagttgactacacagaaggtgagatccttctggagcgactgtcatcctgactattctgacgcaatcacgacaggcatctaccttgactatcgttactatcagcagaacaacttgacgccaagatacggtttcggttacggcctttcgtatacaagcttcaactacaccaatttccaggctcatcgtctgtcggatcaatccaatgagcgaaggtggaactcaggcgaagccttcgccgccgctaatgctaccaaccaggtcggctcgtctttagccaaggcgtaagagatgcacaacccatgggtctatcttgcaaaagctgaccttgtcgctgcatgttgttcctagcctgcatgagccgcgttatcaagtgacggttgatatccagaacgtcggcggtgtttatggttgtgaggtaccgcagctctaccttggtaagcagagagtcgacactgcgctctgctgtacgtttgctgatgtctgcgaaattacaggtttccctgaaggtgtcgatcaacctcccaaagtcctcaagggcttcaccaggttcgtggctaaggttcctgcgttgtagctatgcgagagactgaactctgcgtccattctggcagggtcacgcttgacaagtgggaggcgcaacaagttcaattccaactcagttactacgatatggctgtctgggacgtcgtagcgtcgaggtggacgatacccacgggtgacttcaaagtatacatcggccggtcggcctttgacgagcagtctattcaaggtaccattcccgcctcgtggctgcctgggtccgacgtcgacatctacgccgacctatgagcgttgacagagtcaacggagaagattggtcggcgagaacgccacagtgaaagaaattggcgaaacgccctgctgtagcgatattgatacaaatacaaagaggaaactagatctcgtgttacatatgcaatgtccaattatagccaatccatcatgggtgaacgcagagggtgtcgttatgtatgttcaatgtccaggtgtttgctgattcatgcctgaggagaattttccgcgcatcatcgccatgacgggaaaggcgttctcgtcaccggttgcaagccttccataaggcgaacgagggatagttcccatgtttgggttgagattgtgccttgtgggggtgaatgccagcctatttgctcctacatccacccgcttgatgggagtgcgcgccagctcgaacgggctaggagcgataacagcttcaggtccagctgaaatcttcttggtcgccggatcatcgtcacgaagacgcttctggccggtcagagcgacaggagaagttcgcgcagcctcttggttatgtatgacttgctgtggagccagcacggaaatcggtacctcggtcgaaactggagtctcggccaacgatttgacctttcgctcgagcttatcaaccttgcgctggagttgagctttggctttgttggcgatgcggacttgttccatctgttcctccaactctgtctgcatcccgtctagcgcctgctccagacctggaagtaacatcgaatttcagcgctgtgtctgggtcgcaaacgatagggctttcgcaataactcacgagccttgtcatccgagtctgtctgcgaaggtccagcgagtaacgccttctcttcagtcatctgggcagcgatagcctcggccgctgctagcttcttgttggcttcgcgcaatttatcttcgagtcggctggcgtccgccgtgagagcggtagcaagaccatgcgctttttggtaacggacagaaagcgattccacttcctgggtcctaagagagagaaggcagagatgagaagggatcttaaaccgcggtaagattcgtcgcttacatgacttgaaggtcgctcgacaatcgctcattctcgctctgcgcgttttccaaacctgtattcagttcctggacaagcttctgctcctcggcaagctgttgattggagtcttgacagtgtctgaccaagtcatccctctccgccgcgatctcgaagcggtctctgctatgttccgccagacttcggttcaactgctcgttggccaattgttgagtttcgacttgcttgctcaactgctgcaggcgagcttcagcctccgcgttctgttcgcggagtcgtgccgcttgttccgatttctgcgatacttcttccttcaatctgccaacatctgcgctcgcgaactgcagacgcgactgtgcgtcggttgtctgcgccgagaggtccgtgacttgttcacgcagggtatcaatcagtttcaacgcgtcatctcgctcgatggaaagagcttcgagtgccttttccgagatggccaaactctgactacgctcagccagaacgtcttccgcagtcttgcttgctcgtcctaatctttcgacatcgctcactgcctgtgctagcaagagcgagacctggtcgtattctacccggatcgaagctacttcccgcgcgtgctcttcgataagctgttgtttctgcatggtttgggctatattggtctctcgcaggctcgttgcttcggcgcgtagtgcgacgacttcttctcgagctgaggaagccatattgtctttttcctcgagagataatgacgaagatcggacttgttcctcgagcccttttatctgctgggctaatagagtgacttgctgcgtttccttgctgcaacgttcttcactttctcgaaggtcctggttcaacccatccaaagcttcttgcaagtcagattctctgacctggaaacgactgcttgcagtctcggcttcggttacaacgtgctgcacttcggatttaaggtcttggttttgtaagacctcggtcctgagcttccgtaaagcctcgtcccgagaaatctcgagtgacgagatctctcgcgagaagcgtatcaattgaacggtaacagtgttgagactgtcacaagcgcttagctgaccgagccgagccgagctcaactccgcatcgagtcgcttgcactgctgctccgcatctcctgtcagggcttccaccttggcgagatgcgcccgttcaagttcttgtcgaagctcgatggcgcgtaggccatctgtttgcctgtcgttatctgattgagcgagctgcgcaactaccttaacgtgatcgtcgtttcgctgttgcacttccgaccgaagggcatccgcagctgtctggctcagagcaagctgattttcgaggaggtcgatccgctccaagtactcgtctcgagctttggacatttccacatcctttccgacaagcgaagcctccttgacagagacagcatcgcggagccgggctatttcagcttccagctcctcgatatcctgcgtagccatttccaggttcatttctaccttcttcgttttcgcttgttcggcggcgacaagctggttgcgacgggagacccttgcctctagctcttgaatgtttctccgcagctcaatcacgactccatctgtcgacttggatgtgatattgttgacttgttctcgagcaatacgcaaatcgttctctttccgctgggcctccgatgttgcggcttccagagcgctctcgagttgggtcttgctgtcgaccagatcttcatgctcaagctgaagagccgcaaagtcatctcgtaaacgattaatggtctcctgactttcttgacggtctgatgaagctgtttctcgctcctctgtcaggatagcgcccgcttcctcaagctctattcgtaagcggtccaattgcgcgctcgaaatctgttcggcagtccgtgcggcagacactgcctgagcaaggatgctgtgctctatgtcggcaaagtgtaccagcctctgactttcttcgagatcgtcgctgagtgactcgatgcggttcgtcaattcgatcacctgagcatcgagcttcccagcttgctgcgcggcacggtcgagctctcctcgcaatcgatcgcgctcagacgaagccgctgccagcgcggccttgtcttcgtccgtaggggaaccggccgtagctttggcgagttcatcttgcaaatggcctaattcggcgtcagactcctcgagctgatctcgcatgacgtctagttgattctgcatttctctgtcaaagataaccggttaatagtgcttagtttatgacgagtaatttcgactcacaacatgcgagccttttgcgtcgcggatctcaattccgtatcccgctgatggctagccacaagagcctgttgttccgattctacttgctggagagctgtggtcttcaaatcaatggcggctcgaacatccgcaagggtttttcgtgttcctgccagctcatcatcagtcttcgatttctcatttcgcagctcgtcaagagatcctcgagtctccgtcagctgtcgttcgaccgtatccatgcttgtaaggcgcttctccatctcagtgatcctttccttgagcgcgccgatctgctctcgatcgctctccgcttcggtctcgtttacagaaagagcgacgacccgttcagatagggattttcgctcggtctcgtactcggcgatctgcctttcatacccttcgcacttttgctcttgagcattcaatcgctcgcccagggtctgatataatattaggaagcattaggtcggatttcgagcagcactcgataagaaggctcacgtctcgctttttctcagtctcagatagctttgcctcgagctcttctcgaagatcggccaggctatctctttggccagaaataatagcgttggcttgttccaactctacttcgacacgctgcagacggtcttccagagccgccttttcgtttcgagccataacgagctcttccacctttgctgcgagctgcttcccgagatccgtaatgtccttcgcggctgagtcatccaatgtaatgtctgcgttgctcgatggaagcggtatgtgacgtttgagttcaaagatctcggcgtccctttccgcgaccagttcttcactctccgcgagatgacgcttgagcgcctccttggcctgctgaaggtcttcaatttctcgctgatgggctcgttgctgcttcgcggcctgtgcaatcgtagctacaggatccccggtcgatttgggagcttgagtcaactgattctcaagagtttcaactcgcttcttggcctcccgatattctgccgtgcgagtctcgagttgctgtttcagactttcgccagcgtcgcgcaggcttgagacctctttatcgtcgggttgggtagcgctcgatgaagcagaacgcaagcggtccacttcgtcttggacgtctgacaagcgggactctaatcgcctgacgtccatcttgcgcttctccaaatcgtccgatcggctctgtagttcttgttccaaagccagccgctcagattttgcggcctttttagcgttgtccaattcttgctggacggattgtccatctagagcacgcaggtactgcaattcatcgtttgcgtcggaaagtctactcttgatgtcgtccatctcgcgctgtatagaccgttcagcggccatcttctcgttctccatcttcagtgcatgccttttggccgtctccatgtcggtgcggagcttttcgacctccttcatatcgagaccaggcatcgcttgggatctgagatgttctatttcggcttcgagagcttgaattttgggatggggagcaccgccgctgaaggacagtgctcgtttagaacgaggtgtaggagaaggatggaaagaggtctgcgttcgcggtcgggcgggtgtcgaagccgaagcgttctgtaaggcatccacgatttcgtcaacgacgcgtggaggatgaacaaggcatgggacgggctcacgcttcggtcctgttccattagcttgaggttctccctcctgagcgcctgcagctcattctccagggcgaaaattgtcgccttttccttgccgttcccgccatgtcctccgccaaagccaccggctccgaagataccgctgctaccgctgagcctgacctggttctcgagcgactccttttccgactcggttcgttgaagctgattcttgagactcttgatctcatcttgaagcccgctgaccgtgttctggactcgcgagttggcagcggtggagtctgcgcgggtgtcgagttctacttggacgtacactatcagcaggcagatagacagtctcgagatcgctccgaaggctcaccgtattgtagacgatccatctccttggcatccttcttgtgacgaacattcgcgtcgttcagcgttgactcgaggttggcgagccggatgttggcgttttgcaattcctgcgaggtgtctgtcagcgaacgtgctggactgtgtagatagagtggcagacgttctcacagctatagatttagctaaagtcctctcggccttcatcgccctctcctgctcggtttgtgcctgcaagtttgaaaaaagatgagacggtcaggacaggctctcggccgcttcatcatgttcagtagccaaacttgccttgtacacggcatcatctttggcccgcttcgtctcggaaaagagttcatccttcttggcctgttcattaatgagggtctggatctcaaagtctgcagcagagacctcccgtcaatacttccaggcacagcggacgatgtcggacgcttcacaaacctttctgagcgagctggcctctcaattgcttgaccaactgatccgaatcggccgatccgaagaacgccatcttggcagtccagtctccaacaacctcaagcacacagaacggtgtttaggggagcacaacaaaatgagagatctatttctattgggtcggttcaagaatgacttgtgggtcacgcagaaagttacacccaaggtgaattgtacaatgaggatcgtttgtttagattctactttcttgtttgtttacaccacaacgacgaccctgagcccgcgcgggagcaccaaacgatcgacgcgtcacgtgatcatggctagctatgaagtcgccttccatgctctttacttgctaaacgaccgcatgacggcctcccacacggtcaaagcggcggcattcgttgggaaagctcgtagagcaacgggaaccacgccctaatcgtagcaagatcagcccgcacgatctcggcggaggagaactccgacctgaatcccgacaactcactcggtagaaattggtcccaccgagtagcaagttgcccatcctcgatctcgaagcgcaatctttttcgtgcaggatagtctggacgacgttccatacgcccttgtacttgggttgtgaaagaccgtccgacatgatcctgtttttgacattgtcggccggtagggctgccgcccaatacgctgtcaaacgaattgatctgcctgtcagcatgtccctccccgtgttcaaggctaggaggctacaatagaactcccatacgtaccattacttgccattcctccggcgatgaaattgctcgtcccttgtgacatggcatatggcgtattctcaagtttcgcgaactgtcggttgaaaaattcaaaacctgttgccgatcacactgtcagtcagggcccgcggagtccgatcccgaaacgggatattctcacctccaaacatccactacaaagtcgatacggggcagtgttcagtcatgcttacctcggtgctatggcagcgagatatcgagcgggactcacagcaaaactgctcctgaaccaaagggttgctccgaaccccttccacattcctttcaagccctgcaatttcacagtctgttgtaccacattgattggccccgtataccgttcccggtaaagctgtttcggtacctgatgcaaggcgctggacgtagcgaaatttcgcgtctggccgatcgtcgatgaggtcgggtgggatgttaccggtatcgtcgacgtggcggatgatgaactggcactgggtttgagtgcatccaggctgaactgcaattgcagcttggatttgatcgtctcgatgggatgagcgaatgcagcactaagtcctacgggtcgtgatcagcaagtccagaacgggtgtgatcgaggtcagaggagacccggggctcacttagagaacccggcaaacattcctacgcagaggagtcggacgagcaaacaatcagtaccgccaggccgagataggacaacttgtcgttggcaacaagactcacccgctatcgcatgccctaacaagctcaaccgtttcccatcatccccgacctgcaagacccctcgactctttttcggatcaatctctgtcatcccaaagtccttcaaccatctccggtagttgtgtagacttcccatgaggacggcatccgtcactgaccaccccaaggccggtgccagggctcccgcgtacagtttccggggtccttctttggtcactgtctggatgaaacagtcgagcgcgcccttgtatgcttgaggaggagcgcattggacccgggtcttgatcgtgtcgaaagctaagtcgggcgtcaatatcgggaaggaaagatacggatttcaggtgcggttcgggtacactttccggccgaaacaggctgggagcgtacgatgtccgacgatcaacttggagtcgtaaaaggatcgagatcgagtcagttctccggcgcatggccacggctctcttttccgctagctcaccttggtccacccctgagcatatgaatcatgggcccgtcagagatcaaacccgtagtcccactggcgatatctgcacccaccgaagcgatacccgctgcaaagcccgcatactgaacgctggagctgggtgtcgagatgaccttttcggccggtgcggcgacactggtggacatagtctgtcaacgagtgtcgggatgctcctgtgcgagtccgttcgagttggatttttcgggtgggaaatgcttgttcaaacccatttcatcggacgagagcgagaaatcatgtcgctcaacgccgggaaggtcgtgagatcgctggtgaggcgacgaatgaaagcgcgtgcaggttatgatcgcgtttctgcggaaccgagatcgagttctcgtaaggcatttagcgtacatgtcacgtcatacacgtcatacactcatctgtgtacggtagatcgcgtgcaagcgcgcgcgtgacgagatgacgtcagatttcgggcgagtcagtagcccgtaagtgaaaggggggtaggggagggggaggaggagaggaagcttctagcgaacgagccagcgactacggcatccccccccagttgctggcacgtcacccctcaaccttactctagggtataaagggattcgtcgactacctcgtgcacctatagctacagatcgtccctcatcgaccctcatcgaccctcatcgaccctcatcatctacaacaaccacactcgcactttacacgctcaacctaacactcgaactttgaactacttcacaatgggtaaggaatccaacgccgtcgtcttcaagcctctctccggcagcacaaaggagtactgcgtcttcatcgccgacaccgacctcgtgagtgtcgcggctgcttgcatcagaatcgattgcgtcgacctccttatactaacaagatctcaccttgcttgacgttggcagtacaacaagtggtacaagggtgaaaagtcgatcgctgttaccctcttcatcgactcgttccagcctgtaagcacggaccctcctttcaatcactagtcacccgccttcctgacatccacctgaccctttattccaccccttgtctgaatcttgctcgtcatgcagttcgtcagcgagagcggtagcaccggtcaatggaacaagccttcttcgggcgagttggcttccgactttgagctcttcaacgccgatggtaccgaggtcgcctgggcccacgacgagaccaagcgacccgagggcggagagcagatcgatgacaaccagaaggaggtcagcggagccaagggcaggaaggccaagaagcaccaggaagagtgagtttcgatcgcaccaacagattgcacccttgaaaacctgatgctcatgccccgttggatgttgttcttctagggatattgtcaacatcatcttggcccgtggaaggctccaacagatcaagcacatcggaaccggtggtatggccatgaaccctacccgaggtttccccactcaaggtgagtcgaaacacccgactgcgttaggcccggacatgtcaactgacgagccccgtttgatcgtcctacatcagctggaactggtgccggtggcgctcaccgataaatgcctcgccctcctccaccatcatctccattcctgccatagcatccacccgcctttgaactacaatcacgaaagaagtatacgtccgagaagccagaaagagcgctccggaagaaatccattatcagccccgaaagagaaatcgcatgcaaataaagaaagtcacagagacgggcctacgacttgtaccgttgtcacaagtctgggtttgaacttatcgcataccatgtgttacgattatccgggttggactcgttatgaggaggggtgctctcggcaagatgaatcatatatataatcagtcaaactcgcgttagctatgtctggagacagttttcgagatgcgttgcgatgcggaggtgttgaacgtctacccgtctctccgtcgtgcacgtctaacctctcaatacgatacagcccacgagcgtgacagagggtctttaacgacagcctcgacaggcaaacggagctccttgcccttgaaccccgttgaaggctaatccccgggcatcgtttacgtaccaaagatccaaaggagggggatcggatcgtcgtaggtggatccgaacaagaagaaaaagtttgatcatgcagagcttcgacttgattcggtagcgcgattgagtcccggcaacgacggatcgggtggataggttgggggtttcggtgtctttgaagaaatgagcagtggactgggtacgtatacggtccgattatatgtatacgagagcagaaggcgagtcgaagggtcaagcgtccccgtcggcctgcttctgacgagcgatcgagcgagcatatccatctgattcttctgaagagatattactactgaatatgggcgctcagtctatacaagagtctgtcgtggcttccccaactacgacggcttcgagtcgcgcgggactgctctcgaacacatttgtccggctgcaaagtcagtctgattcgccttctaccagctgaagctcactgaacgtttgcgtgcgcatgtcacagcgaagaggagctctctggtcttgctcggatgcatgatcatttcaggtgagtcctagggtctcccacgtcacgccgattcccagctcgacataggagtagttcatatgcgatcgacgctcatcggccgatatgaaacaggtggcaatttggggtaagccccttctctcctgcacggatgcgcgcgatcgcaacgagaaccagacggttcggacccccaatagatggcctatgtcatacggcgcttttcaggaatactatgaacgtgaagaataccctaatgaagagccatccgtgatcagtcttgtgaacggcatgtgctgcttggtaagcgcaatctcaggagaggcttgaccgaggttctaaggcccagactgacctcggagaaagatcgggtgcctgggtagtttcgtaggagggttggtcggtgacaagatgtgggcgagtgtctccagccgtaggagtgaccggtactgattccaattccatccccacgttgcttcttgcgaaaatagtggtcagaaagtaagctgaccagctgtggctagccacatttggtcgctcacgagccacaattcacaacaccataggcatagggctcctcatctgtttcgtagggacgctctgcgcatcgttcgcccgctcgttctggcagacatttttggcccgcgtgagcgtatatcagtggtacagaggggatgtcagacctgatcgcgtccagacgcagggcatcgtgttcggcatcggtcaagcctttgtcgttccgatagtctttacttacccatccgtgagtagtcataagaagctgtacaagtattcggcctggattggtgctcaagagatgttctagcaatactttccacgacactccggcgcagcgaacggattcgtaggcgggagcgcaggcttcggcggcggggctcttgcattgctcacccggcacctgcttgaaaccaccacttaccgcaatacgatgctgtattgtgctgccatccaaggcgcgagttggtttcttggttggctctgtttgaaggacttctacacccctcaggagattcgggttgtcagcgagcagctcggcccagagatcgtggaaaatagcctcgacgatcaagggtctgcccggctggcaaatcaagagatcaatgatttaggcactgtcaagacgagaatgtcagaggtcacggtgactatcgcgccggagagatggcactattcggtaatgcctcggtttcggcacttttcggacaagctcacgttctggtcgcttgtcatggctgtcgtcatcggaaccctgtgagtttattacctcgaccaggttttatgggcacatgtgttaatccgaacacgccactgttagtggctttttagtgagcgggaggtcgtatctcaaacgttctgggggatgctaaatcatttcgtatacaaaagacgccttacacctatatcaccagctacacgagacatttctcagccgatgccaccgatgacttcaaaagcggcataccgctcgtagccatgcttttcgcgatgggatttggaagggttggtttacgcgatggttatctgagtcaagagccgctgacgaccatctcggtagattttactgggattgacctgcgacttctacggctctgccgaaacgttcaccgctggaatgctagcggcgggattgatccagatggtgggctggcactacgccacatcgttcgcaggtctcatctgcttcgccacggcctacggtctggtgagtatttgcccagatgcttcaaccgatccaaatcataacatcgacattccgcttccgaacagctctcgggcacgaatctgtaagacatgatatcgtcatgataacgaagacagaggctgagccagatgccccgcctgtgctcaaagcacccttccccccaccattgcagcacaattcttcggtacatcgcatccacgtctgggatcagcggtcggggtagtgactacacccactggattcggtgagaacttctggctcaatcatgttgctggcagaaaacctgatctaacatccatgctttaggagaagcattcggacctgcacttgcaggttccgctcggacgatcaaatctgtatcccgagcctggctgttcttgccggctatttctggggctttccagattgttggagctctgtggatggtcgttgtgcttaggggtcgtatctatcgagctcttcgccgagttttccgcaagcgaggcagccagagcatggcctgagccgagaaattacgggctggagcaggttttttgaaaaggaaagacataatgataaaaaggaacgtcataaaatggatgtggtgtaacgataaagtagttcatgaagaggttcgtgtgaagtggtcgtacggtatgaagtggaaagggtctgaagcctctgaggtcatgacaacaaagatcgccgatcacgcccattccttagcaatcttgaagcctgtaacaacgaaatttccagatcagcaagtcgtccagtcccagctatctgcggtcgacctactccactcaaagtcgagccaggtcttcttgtcgtcatcgatgattctgcttcgaacatcgtaactgccggaacgagcgagcatgccagagggggattcttccgcagcgaactgcgaagatgcagcttgggttagaatcctagtgtagtctatctcgacacgaacatgactcacgattttctggtaaggatccttggccgggccgtaggaaccaatcatggcctgaatgataacaggcaagatcagcatgagcgagtatgcaacaattcaggtccaatcctgattaacctccatcttgtcgactatatgagggaacacggtcaattaaatttaagccgttctgcagagaagtaaggcgcccttgctgcactcacgcgaaagaccggcacgcttgacgacttgaaggtatttaagcccggatacgatctgcccttcgacgctgcgcgtgcaatgtcgccagatcagtttcgtagttgacggtctcgttgaagctcggctacgtgacgaacctgaaggtgattccgacgctgtagtcgacgccctgtacgtttttatcaccgggatcagggtgattcgatacacgctgagaagttgcctagcggctcacctccttgatcaccaaagggttctttttgaacctagtagccaaggcggaagctccctcggtcaggtctaggacgagaggttttttcaaggaaggcgactccaagaagagagtctgaggaataacctattgtatggcatacggtttcatctgattagcactcgcttaaatcgcttgactgcgagtcttaacgcagcggaggggtgataattctgcttaccttgccctcggcaggccctccttgagctccagccaggcccagcgaggctttccaacgctggagagactcgtcctcctgcgtgggtccaaagccatctgggatcagtcggctgcccggctgcacttcctatggtatgtaacattgcgagactgaccttgtcgagattggcgagctcggctacggtcttgctctgaccgaccttgtacccctcggtctgtaggtggtagcacagctaaagtcagtatcgatgggacagattgtccggctgggctttcactcacggtcgaagggaccagctcgtcgtcctgtacctgcggtagagcgacatcaatgagacagtctaccgcgactggcctcgtgcccgctcgcttaccgatgattgtgcgaccatgctgttttcgtttgatttgatcttttcttcaagaggggcggtgtcgttacgtcgttacgtttcgctctattagctgtatcagctgtaacagacaaaccgaggtgagttgtcgagctgtcattgcgatgttgatgatgatgatgatgaggtggttggtttcccgctgtgctgtctggtagctcgcacaggatccggaagctattgaaggcacggtcggaagcttttaccgagtctaaagaaagggtcaatagaccgcacaatcatagctgaaacgctttgatgcatcgtgccgaatcgtcacttcgatcacgttggtatcgcatcgcgtccagcccatcatagaccatgaaacacttcaaggtcaaaggaatgtacggagcgtggagaatggctcaagcgactggtcgcatcaggaaggctggctgaaaggccatttgaacaattctataccgagcgtgactcagatctttttgacggagactcggctggaattcaagtgctttcccagttcacagtcccctatcctgttgcataaacccctctccgagtacccaaaaatccctcatcgacgatgtcttcctggatcgacaccaatctgatccggatccctctggcgcgagctttggagaggcatcaacctgaagtcaacacggaccccgcgatgaaggggtacggaacgacctgtacagaaggtcaagtgtgagcggctcgacttctcagaccttcgcctcgctttttttccagctcattctcgaacgttgacagcccggtgagctactcgccgttcggcgaggtcgtttgcgagaacgtttcgatctcaccgtcgcgaatgagtctcgcggtgattgtcgtcttgagtaagcatggcgaaagacaacgtttgcgtaacaattctgatcgattccttctagtctccttgtcgggcttcctcttgattgtcttgccgatgagtctcatctgcttcaagcactacatcgctcataggcgccagcggaacgaacgacacattgccgaaagccctgacctgatgagcgttcccgtacttacgcgagacgctgaatgggctgcgtcacctacgagcgaagaagcaggagagaagcgccccgaagagtcactcgaccgatctacgaacgatcggggttggggaatctttcggagttcaagttgatacgcccgtcattcgctatcatatatgcccaatgaaccacaatttcgtttgttctccgtcacgcgcggtgtctacagcatgaacgcgactccctcccaagcatccaagacgaccttgccgtccttgacctcacccttgtcgagcgttccaatcaaaagcttggcattgcctgtgttgacactactgtcgacgacgaacgtctgctcttcgttggaaaaattgaggacgacgagcaattgggttccctggtatgtcttgacgtaagcaaagacctgctcattgtcaaagtccaggaccttgaagtctccgtatgtctatcggatattaagcgccatggatcagcatgattgcagatcgaaaccagacgtgacgtatctgcgcaacactcaccataacgaggttgtcatgcctgaccttgagaagctgcttgtaaaacgaattaaccgacttgggatccttgctctggacctcgacgttccactccttgtagtcgtcgtgaatcctcatccaaggtttggccgtagagaagccagcgttggccgaggtgtcccattgcatcggggtcctagaaggggaatggtagtgatgagcgacattgcccagagatgggagaagtgtttgagcctgatccttacctgccgttatcacgagccttcgctcgcaactttggcacgatgtcagagacgtccgggtcctgctctccggtctcttccttgcgcctttctttaagactgtttcatactgaaattcagctgttgaaccggtcatgtggccagaaccttactgacccttctacccattgcaccgaggctacgtcgatatattcctacgttttaccgggtcagcacatatccctcgcctttgcttttaacgacttacttccacaccccagtcgtgagggacgttacacatgccaatgtcctctccttggtactgtcgaaatccgtagggccgatcagcccaaattcctatgcaattgatcacctgagcttacgatatagatggtgccactctaaacgaagaacatgcagaatcagcttgaattcgaaacagcaagagtcgaagggcgacttgcaagagtgagctgatgcaaagcaagcagctttccgcttcgagctcggttctcgccaacatccgaggcgaacctcgaaatcagacgggcttgatcgtggtttccgaagtagacactgtcgaagatatcgagtggagtggttcaacacgagcttcagaccactacaggagccagagaggactcgcctgttccacccgttgccttcgtacatagcgacctgccacttctgatgaatcttcttgatgtcagtaagcttattcttcttgggctcgagcgggcccgaaggagtcccatcgacgtcgtgactgaggaacatcggacgcagacagtcagcaaatgggtcttgtctcactcggacgatgaacttacagttcaaagttgaaagtcatcctcaattcgttgcttcgaacatagtcgatcaagactttgggatcgtgagtgaagggagtttctccgacactacagagcattgttgtcaaccgctgtcgaacaagctgttcagaccagtaccactcacgtcaggacgtcgtaatgctgcatagcaaaagattgcttagcttcattaaaggaaaagaaaagccgagatatgtcgcgacttaccgagagcaccttggagttcatctcctgtaaaaactcgtgaatacgaggactatcgcaacagtcgtttcagcgcgtgtcattcgtccgatgactagatccggtcaggacgtacccgttggcggtgaattggaatccaggttgatacttgtccccagaattgacaacgggcgcatcagggtatccaggaaccttgctgatcagattgatcacgtccatcctccatccgtcgatccccttgtccatccaaaacttcatgacgtcgtatacggcttcacggacttggggctcttcccatttgagatcgggctgctccttgacgaacaggtgtaggtaccactcgtcagtgagctcgtcgtactcccaggcggaaccggagccaaagacgctcttccagttgttggggggtaatttctcgccgttgggtccggttttgcccttggcccagtggaaccagttcctcttggggttatcaagagaagatcgggattctttgaaccattcgtgctgcaagacagatcgggctcatcaattttgttataccatcgccaaatcggcagtcagaatgtcggctcacctcgctcgagcagtggttgacaacgagatcgtgtacgagcttcatgccgtgcttgtgacaagtggcgagcatctcttcccagtcctccatagttccataaggttcgtgaagggctcttcaagaccgacagtataagctcccagtctcgcttatctgccgtctacgagactcacttgtagtcgctaatgtcataaccctgggaaaccgcaaagcgttcgacgattacgattcgatttagctccgagatgtgtgtagcacggcgaggttgtatgactcttctcaccatatcatgttgaggactcttgtagatgggacacagccagatgacgtcgacgcccagctgagcgagataagggagtttcgacgtgatccccttgatatcgcctgcaagcgcgagagcttctgttcagtcacggagcactacagtatgattcggtaacgctcgactcaccccatccgtccccgtttccatcgcagaacgaagcctacagagttcgcgacgaaaaaaaaaagtacaacgacgatgacgagcgaaatgaagccgtgattcagctctccagctgatgtggttagacacacgtgcatctgctcaaacacactgggtagatctatcatgcaaacccaagatatcggcgaccagtgacgccttcgaggtgacgacgaggcgactcacctggtagacgaccgcttccttccaccagtgtctctcttcaaaagggatgacgaatttgctatcgctcgacatgttttcgttcgatgtgtcttaatttcggtttgtttgcaaagcaggttgcagtttctctcgctcttgaaagcagctttgagcagaaaacagggataaagaggcaagaggttccttgatatataagtctactccgatcgacctcgcaacgttcgccatttgctgagccaagacgccgacgacgttgacgtttacggctttatcctcgtagactaggggtggtcggtgctgctggaagagggattccgattgaacgcgatttgatcgaaacgtccggtcccggtccgatgatcgaccgatgaccgggctagtctcccccgtgggggttgatcgctaactgccattggcactgttagaagcgcgaccgaccccacggtcgagctacaagcgcgaatgacgagaacgatagtggcgtaatctcgaccgaggtgcgctactttgacacagcccgcgggtctggtcatcgtcaccacctggcgccggtctagccctggtggccgcgggcgaggattcgatccagcgaagcggtgacggtcgtgacaaaacaaacacatcgaagcgaaggcgaacaggaaacgagggtcgtcgagtttgatgttgttgcaataaataacgcgaccttcgagctataagatacaagttactgcgtagggagaccgtagtggagggggtgcgatggtcgagagtagtagtggtattcgatgatcgtgaaaatgtttggtattcccccccccttatgcttttggcatcgaccccgtcatcagagtggtcacctggtcctccgtttgttgtcgtgcccgtctcatagtctgttcgtcgatttgcatcctgcatcctgccatcctcctcttccctgtaagcctgtaacttgtacagtgggttgtctcaaaacgcccccggctgtgaggcgacgtgcttgctcggtagctcggcttaacaatccagagcgactactcatcaatcaaaacaggtcgaccggcgcctcgtcaggcagtccagagcatggctttgaactctatccgtcatcattctgattgacgacgacaataacaacattcggcagccgcttccaccgtcgacgattcaaccctccctttgccctttgactctatccatcttctactcaaacagcagcacttagtttcgacatccaaccggcggccgtggcttatttcgaatcacattccagagacttgttctcgagctagtttgtcaaaacacgtccaaaggaacctcatcggatcccagctcgaaccgagtggacggatcctcgcttttccttttctccttctcgtcgtcacatcacttcacatcggatcacaacgtatacctctgtctgtccgggacctatccaccgcacgaccacctcatttcggtcttgcccatcaaaccccccacatcgcaacttctagtcgataattccctcgacgaccggaccaaacgacacagcacatcaaccacggcacttgcagtcgtctttcttcccacctcctttttcaccgaccaaggctcgatagtcaatctaccttttgttagacaactagtacgatagtgtgaactgccatcaagaacagacggcgaacgctgtgcatcagatcgatcaccccatcacggacaacaaactcgtttgatcagcgaaagcggggaagcaaaaacaagcagcctcaaactctaccacggcgaatacgtatcggcatcatttgcaaaggtcgacgttgtaaacttctagcttcttgctcctcgacgctcagaccgtctcggaccgataaacctcctcaaagttacggccaagtcgacctccggattgagtgtgccgactaccgctcgttcgtcatcgatcatcaaacattaggagccgggacaacaggggatttataacagacagcgggatatctgatcttgtaacgagatcgagaggtgagtcagagcaagtccgtcgtcagccttcgtcgtctggagagagggcaaatatgatgccgagtgaagtcatgcggatggtagagagccagacacaatgcctgcgtagttgatcaaggctagaaagcggaaagcacagggtgtacttgttggatgcaaccagatggcgaaaggagggtcggaattttgggacgagggcagatttgctgatcaatgacgtctactttgcgttcatactgctctattggtggcaccgacatctaggtgtaatcgaccgtccactagctaccatccctgacactggatctcacctttgcgacggcgaagcacgacaacaaccgggactaccctttatattccgcctagcctacgcccctcggtatctttccctcgacctctgtctcatcatatggccgtcatcgcatccagacccgaattgcccgcctcttttcactcctcgtcctactctccttcggcatctccccggatccgtcctgcctctgagcacagtcagagagaaaggctgccctcgacggcctcggcccatcaaccgacgacttcttcctcttaccgacaatcttgggcgagtgactcgtctgttcatcgtccacgatcggtttcctcgtcgagcggcaacgtgttcagcaacagcactcccggcgtcaacggttcatctacctcgctaaaggacacgccgcacccccatcgggattatatcgctgggtatagcgacgagctttcgagtcgcgatcaagagcagctggatcgaccggcctttcagaggagtcattcggcttcctcttcgttgagcgcacgacgaccgctggaaccttcgttgacagccaacatgagctcgaaagatgggtcgagacggcaacagcaacaacctgcgtcgggcgccgttcagaacggtgcggtgaggaggccagcgtctgatcgggacttgcaagaaacgtttgacggtcagaacggagtcaaggtgaagaatggcccgggggagacgcccttgtcgcctttgcaccagtaccagtcccatcaatcgcagcagcagcagcaacagcatatgccgcagcaacaatatggctactttcctcctccccaacagccttggacggcaccacaacgatcgggctcaccctcggcgggatctcctggaaatggctcgcccatgttttattcgccatatacgcctccagcccaacttccccctcagattcaacaactttcaccttcagcacagcaagcatatcttcaagccatggcggcgcatcactaccagaataatcaggccgggatcgctgcgtgggcgtcggcgtatcagcaaggaatgatgatggctgctgcacaacagaaccagcaaaaccacaacggaccttaccctaatcagaatcaagggatgcccaggtcgattagtaccagttccaacactggcgatggcgaattcggtcaacatgctcagcagagagatcaggcaagatccgtcagtggagcatcttcgcaatcgggtgcgcctgggtatcatccctaccgtcgacagccctcgaagcaaaatatcgctgggaaagagcgcaagcgagaagccagctcgaatgcgagttctgctaggtcgtcgactgggaactatcccgaggccgacgacgaggtcttgcgggatcctttcccagtcgtgaaccgttccgacggggtccgagcccgggcatcctttgatgacgctcatcgtgccagaatcaggcggggtagtagctccagcgccgagcatttgcctaccgctcgaatcgtcgcgcccagtcgaaaggcggttcaacaagccgtccaggccaacgacaaagacacgcgagcgagctctcagtccgcatcccggcagagccatgacgtcaggccggatgctacatctgaccagtctgccacccgacgaaacatgcacaaacgccaaaactccagcacgagtagtgtcggggaagtcatcaagcctaccttgaggacggccgagagtggcgcttcgatcggcacgatcacccccgcccccgctcagacggacggattgaacccggcagcccgagaatggactcctaccccgtcctctctcctcgcgcagaggccctcggctcctagcgatcctactcggtcccctggccgaagcgtgtctgatggcgtcaagaaagaggccgacaagaaggaaaagaccggtcttcggggcaagctgcaaaaggccatgaagcgcgaaaacgagcccgtcaaaattacgccaaagtcgcctatcaagcaggctcaacccgtcatcacgacctctagctcggcgcctgcgacgcttcaccaggcgaacgattctctagggtcgacctctaccacaacccggtcgacttcgcctcctgtcactccaccccagccgcctactccggctgggctcggcaaccgacgaccgagcaactcaagcttcgcgccgtctctcatcgagcctctggacggtcggggcgggaaaccaaaacgaagcttgttcaacatgagaaacgcttcgaccgacaacatttccatcagctcgaccgtctcgtccgcgagcatgatgatcaggaggatgggagcgctcggcaagattgcgcgacgtaacaggtgagcgcgaatgcgcacgattgaccctatacgaccctctcaagcttactttcccaacccgtagtctcgcgagcatctccaagattttcaaggacaagagtgcggaggacggcgacattgtggacgagcccaaggatggcaagaagaaaaagttccggttcggcaagtcgcagccttccacagtcgccagtagcacgcacgcccacgctgcagatcaagatcggaccgtggaaggtctctcgccagccgctcagctagcccgccagcataccctgcgctccaagaacgacaacaagggcggtgagcgaaacgctcaacagccggcgtcccccgcggggaattcacaggtgcaacgaccaagcgatgaaccatacgacagcgacgacgcgagctttgcggagaacgacgatgtgacggcgaggctggaggatcttcaggtaggagacgacccgcgggcctcatatgagaattcacgagagtgggaagagaacgcgctgtactggggccagggatacgtcgaccggcatgcgataccagccaaggggattctcaagagtaagccgccgggtcgaggccagcatacaaacacatgctgatacgtctcgtaatctttccaggcgtgtcgtcttatgacggtgtgtcagatctgtctgctccgaacgctccgtggaatcgggcgagatcaaactccaccgacattacgggccaaccatccgagccaggacctctggctcatgttactgaccaaggacatatcgacggtcatcgtccgaacgaagctatggacccgttttcacccagctttgatccttttgaggctggtcacgacaagacgcaaggcgccgaacgacctggcttgtattcgaacgtctcgctcaattcgtctgccccgatgttgagcttggcaggccaggctggacgtcccccgagatcggtaacgagcccgatgcctcgcaagaggttgaactgggcacccgagtgcgccatctaccatacgttccacgcgacggaatatgaccgccggagcgagcccgctacttgcaaccgcttgaccccggctcttgcgcaagagattaaggacgagttgaacgggttcaagatggaagaaatggccgtccacccgtcatcacgtattcacacgcatttcttgtgagtcagttcgaggggcaacccacagatagaggattgatgctgatcggcttcggtctctctagtgtctgagctggctcgacctcgaactgcctcgacgactcgacgcctcgcttgccaccgaaatggcagaaacactttataccacccgcattcccattcttgcttggcacgtacggcgaccgcattcatgcattacttgatcacgaccttcgacgttatacgactattgatttgtactttacttgttgaaagacgggggttccgactcatgaccggtgtgattattggacagttccatttgagattttggattcgggggcatatttgaggaagcaaatgcgaggttgtttacgatttgacttggtaactcgacaagcgaatcgacccttctgtgaactgtgatctgtgatcaactggcgactgggcttgatattaaaaagtgccatgctgaacaccgcgctttgatcctggtgactcttatcgcccaggcactttctctgccagaatggatctttacatccctttccccgacctgactccgtcgacaatcatgtcgttctccgcctctaccgggctacctcgacagacacctcgaatgcgtcgaaatcagccgggcttgaccagtcacgacccttttagccagcacggaggatcgtatcaggggcacgatgccccatccaatgttctcgctgggcctagcgattccaatggctatacgtacggagacgaggatgtctatccggacgagctagttggataccgatatgagagaccggaagatccaggtcgaaggatgaggatcgctcttgacggagtcgtggaggatctgagtgatcaggaggatcgagtctacacagcagaagtgagttgacgttcaaaacctaaataagtgcgtttctgaagcacggcttgaccataggcaaacttgagagggaccggggaagaaacgctcaggccgataggcatcatgaggaccgccagagagactgctcagcaaaggagggtaagcatacgtatgcaaaggagtcgctcgactgcgaaaggtaactgaacaccacgctcgtctcatctcagtccgaatcaccatccgacccgggagaccgggatctattgcaagaggaccatctggcagtgaatggacaagacgtcaacatgcagcaacaagaggaagcgtctggcgatctctcgatggaagccgtcgaagacctagatgccgatgtcgaagatcgtgatgatagtgggcagacggaaggaagtctagattgagatccaatgattcaatgtatcgacgttgtatagggccagtatcctcgcatcatgaaagctcgtcgtcagaagcaagcggctcgatttgcttggacgataggcctgcttagttcagcctgacttgcgaagaacgaggtcattgagaagattgtgttggagtgattgatctctggcttttcatggtgacttagacacagttgatgatcatttccacaggtggcgagcggaaaagcgggctacctcaggaagcagaagcttcggaccttggaggccaagctcattcagggctctcgggagtagcaccgagggagaggacggtctgggttgaaaccggaaggacgagctcgcagcgcgggcggaggtccagacgcttctgctcctgttgccgggagacacaaaatccgatgacgcctcgaccgcaggtccaattcccgctttatcccggcctcatcgtcattgcatatcaacggatgttcgcggcgcttaccgacctcgtattacaagatgtcggccctttcgtcgtatgaaacgcatataaatcggaactggaactggaaacatacaattatatatgattcctctagaatacaagtcaatcctcctaacccatcactacctcacctgcccccccatcattcaggccggaagcagtgaactgatggtgatcgcgcctctagtaaccgacgaacgagtccaggatcctcctgacctctcggctatcctcgctttgtcctccggtggtaaagtgcgaaggcgcgatgggcatcccgttgaacgagctggcggcgcacatggtgtacgcgcccatctcgccccatccgagccaatcgcccacctggatccctcgtggcaagtgaacgaggttcctgacgcagtcgatcgagtcgcacgtgggaccccagaccgaggcgcgctcagtgtccttgtaacccatggtgacggtcaagtcctgggcgaggtgaacgttgggcgggggaggtccggcgagacgagggatggcacgctgaacgtcctgcccgatcgtcaatgggtacgggtggacgatctggtgatcaaacatgatacagttgaaagcgctgtagacgccgtcgttgatgtagtctggggggcggtcgcgtaacggggtaaaagcgtcagtccggtatatcttggggcgggcgtgacccccttgtcgacagcgcgcgactcacacatgacatcagccccctctccctcggccttgtcaaccatctgaacgtcctcctgtacgatttcctcttcaagcgccttgcgccgagcgatgatgctagtcgcgagggtaaacgcgggggcgaccaagaacctgcctggctcggcgacgaccctgacgccctcggcgacgggaaagtagacttccaagctatccctcaagacctttgacatttcgtcaaacacgacggcctcgaacccgccgccgacgtccaaaaaggtgaaatcgtacccttcggccttgcccatctggaagacctgtttagccctccacacggcgtcggcgaattgcatgggatccttgcacccggatccgacatggaacgagaccccgatgacgtccaacccgagctgcttggcgagcttgatcaacccggcgcatgtagacagaggggcaccgaatttgagtccgagtcgacagagagatttagaatcgtccgtcaagatcctgaggaccaacttggctcggttgtgtgacctggcaatcttgtgcaactcgtcggcattgtcaaacgtcatcatctcgacgccgctgttcgccgccgctcggataaagctgacgggtttgcaagggttggcaaagatgatcctgtccggcgagggggccgaggggagggagagcaccgtgttgatctcggcgaccgaggcgcagtcgaacgaggttcccatgagcgacaacaggtgaagcacgacgggggaagggttgcacttgaccgcgtaaaagatctcgacccggtcgcccaggggggactgtttccactttttcacggcagagtagacgtccgagaggtcgccgacgaaaaaggcggattcttgcccgctcaactcggcctcgcggatcttggccttgatcaggtcgtccacggtggcatcgtgcacggggacgagggcgtcctcgttgatacccaactcgctggccgtcttgccacgcggggaaccgggaggcggggtgggtaggaaagggttgaacgcgttgttgatgggaagactggcgagtcggtcattgacgccagcatcgtgatcgagcttgcggagatactcgttcaagggctgcccaatggggtcggacgggtggtgagcatcgagtccattttgcttggccgggacgagtcgaaggacttgctccacggggaagcgcgaggtggtggtgacggtcgccatgcggttatgcgggtttgtcagagcgaggtctgttctgggttctttcttctatgtgctactctaatagaactatgttggtatcggtgcgacgcgggtctgggtcgcttttcgggaggagggtggctgattgtggcgtgtggtgctagggcggtatacaatctcgtgcgtgttgaatatcagaggtatcggcggtgaacgatcctagggtttctacggttgatgggtatatgtcctgtgtagtcttttgatggaatgagtatcgacggggtcttgatgttcggtattcgtttttgttgttttgttttcacggggtttcgagcacaggcttgattagggcggctctcctttaacggtcacccactcgaggcagagcaacctgagagacggtaaaaagacggcatgaggatcagctcttgatctccttgcctgcgggtgcagtttgcaggttctctttgatgatcgtgtgtaccgggggatgccgacgtacctagggtcttcttgcctcacaggtgatgaaatgatgaaagctcggtgcgtgaggagaacttttcgatcccactctgtcagcgtcgtcccctgttttcaaggaaggcgatcgagagagaatgagagggaagagctggtagacgatttgatgataccgagagcaaacgtggtcagtcatgcggttgtgatggacgcgaaaagggttcttggacgggtgggggatatttttttcacgtcgaccgacttacctctgcctgttagatggtcagagttttgtataggctcgccggtaataggctgcgtgtgttttttcaatgttgtatgctcgagctagatgacgagtagtgtgatgaagatggcagtttactggtgatgagaagaggtctaagagtgtgtggcgtgtgtgtctatgtaagtgtgaacgaggtaggtcggggggtggtcagccagccatcgggacccgcgtcatttgcctccacctcacctcacctcacctcacctcgacgtagtgatgatgatgatcgaatgcgattcgcatattcaaaagagaaattacgaacacgcgcgagagagattccagccaaaaagaagcgcaaaatgacacgcacgcagccagcgaccaccagccacagccacggccacagccacctcacacacaccccatcatcatcgataatcaaatcaagcgcatcccatacgcacacacgcggggcgcggtttcatcctctcgcacggcttcgaaacgacaaaactcgttcaggctcgactctcctttcaacttcgtacccaaaccgcccatcaggtctcagaagctcatcacaaagggacttgatatgttatggccaagatctcaagcttgatatatgtcaagcccagtccaagcaaggatcgcgtcaccatgctatccgaccatctgcgacatcggacagcccggcacatctctctgtgttgccattccgattaaccgatcgctaccatgccctccgaccacagactcgtcaaagcgtatatcgaccacctatcctccatccacctaacctctcctatctggtcagcccaatccgacctcatcctctcctttctccaagctgtccactccccatccttctcagacccccacccgacgctcgccaagtctccttcctggaagacgctctggggggagatcgactcccaagaccccgttgacggtcggtggtgggtcgatgtagaccccagcaagttgtcatcagaagtcagagctgtagcttgtgagatactggtcgacctccgatcgggcctgtccgtcttccttgacgaacgattcccgggtaggaaaatcgaggtgcgatcagagggagagagaggcgtcaaccctttcgaagagagcagtgaggatgtcgcatgggaactcttgcggaccgagccctgtcagccgatcgtggccaagcgggacaaatccgcgtcaatgatgccagcgacggtgacggtgagactcaagttgaccctgagatggagggaggagagtaatttcaagcgtcatcgtcatgaagacgtctaccgggaattccatatcgatgcccccggatcccctgcgtacccagtcccagccagtaggatcgataccgtccaactggacgagtgttggtatggaacgggaagggatgggggtaaagaattcgagcatctggaatacgctgggattccttatgtgcaccacccctcttctagctacaacgagagacggtccggttcactcaaggaagacacagctcggtcttgctcgtcggaagacaccctagtgggctcgggcgaagtaggcaagatggacgagctcgaggtcaaggtgtgggctgcgcagttccagggtgactccgaaaagcggtccgatagaacgaggtggaggaggatcaagaggtcggtactgtaggggaatatatctgaagtgagcatgtgtagaggaagaatgcattgacactgcacgtgtgccgctacatgcgaatatattgagttggatcgaggagatgatttccggcgagcgtttcagacgagctagcttatcgtagtgagcctttcatcaggtaccagtctggtttttgtcactcccccactccgctggtcgtcattccctttgatggccaatcgattttgtccgagagggtgtcgtactctgtaagagggctgggcttgaaccgctttcattatccccccgccgacgccgctcgttaccactgcgattatgccggccaccagctctacatgctaccccttgacctgatcccactgaaactccccttctactcgccacgaggccagttcagcgatagtaaagccgctcaacttgacctacaccaaatctttggcttgaactggactaagacgaccgtcaccaagaggcagccatatccgcaaaaacgcgcaagttgtcaagggcattttttataccctctcgagcctcttttgccagtgcctccttgcgcatagccacgtcgacttgctgtgtcaacctcttgacctcctgcgccaacgtctcgaccacggctcgctgccgtccagcacgaacctcgaaggttcacacaagtcgcttgtgcgatcgggaacaagatcaagaatctccttggcctctcccttggcagcctagagatacagaagcaagcgatcttcattctctgtggcgaatcggaaaggatgaacagggtgttcgcatatcgtgcgttcggcccctaccgcatcttggctggtaattggccgagatcaaagacgcttcagtcggagacggcgggagcaggctcgagtttgaaagcgcggcgcatgactttgtcggaggtcgctcttgagcttgtgactttgacgtaaccgttcgcttgctcttgtccaaccacgagggagggtcgacaaaggcagggggggggggcccgattagatcggggccggtatcttcctatcaggatgggaagaatgatcccggtcctgctcggcgaattctgtttgtctatgcaaaaaacgcgatgacacctcttcgtcttagtcgtacattgatcggtttggggcactcggttacagttttaaaacttctcgttttcctcgagacgatcttttatggcgacctggtaaacggacatcatggtggcgacttgggcttatcgactcaaagatccggacccatggagcctacctaccaacaacaagcctttcgatacaggaacggctctggctacgaacaggctttttctattgcgtgccagatcgaccattggctatcgctagcccctgtccgatgactccatgtcgcctgaaatgatcgtgtctgagtagacggacgaatggcaaatctcgagtttctgtgcggcgaggtccgttccctgtcgacttgagcaacacgttcgtccatccatgacttgccggatcacgtaacgtaacggcttgcaaacacgatccgttcgtacggatgtctctcgaccacctcgtcgatggaagattattccggataggctttgatcgctctgatttcatttggatacatcaatcggtctgacacctccatccctatcactccacgcgcaatcgtctcttgaattcgcgtaccaaccttcaaaccttggacttggcctgatcgtcggccttgaaatccatcgagatcgaattgacacagtgtcgctcgtcgatcgggttcccaaacttttcgcccttgaacacgtggccgagatgacctccgcctagtggattgaaaaggacagaagcgtgagcctcaggggatcaaacgatctgtaacggaaccaagggttggcgtacagttgttacagacaatctcgatgcgctccataaacatgcttcggtcgacgtttcgtccgacagcgccgggaatggcttcgaagaatgcaggccaaccgcagccagagtcactgagaacggtaagccattgaagctgatcagtaaccagtattaatagctagatgacgaatgggactaacaatttggtggtcgacttgtacagaggagcgtcacaggcgccacaggctgtgaaagagagcaaataggaaattcaggcgggggtcgacagtggacgagggcggaacacgtactgtaaacaccgtcttccttgtgcttgttgaacttgcctgatcccggagcctcggttcccttctgtcgcaagactcggaactggtcgcaaaagacatacggggcgagttgagcggcagatggataaatcgatattgaacttgatgctcacctgctcggggctcaattgagctctccactcagtgtcaggcttgacaaccttgggaggcagaggtgcctcgtcgttgttgatatcgttcctacccatacttccgaaactagcggtattacccaggttgaagagtgagaatccggcgagaggagcagtcgtggcgactcccgaggtgaggacggatttacgtgcgagcggtgcgaggcgaattgaagctgtcttcaagatgttggggagcatgtatatgccgcagatcaggactattagcgatgtgaggacggtcgagcgtgagatggatggcatgtaccgaatggccctgacagtggcaaagtcaagtccttgcaagtatacttctcgtcttttgaaccctttgcccgatcgccccgatggtgctacgatgacgtgtttgccgatctcggcacaaatctgattccgaacgcaaggatatatacttccgatcaagtttaggtaagcgagttctgatcacagtctccgaggtcacgattgacagtcatgtcgaatccggttcaccatattgcaggttcaagcatatcctgacgaccaatttacttgtagtattctcgaaacgcccggcaggcacagcaatctcctcgatatgccacactctcatcatagtcattcgggtcaattctgccgacatgcagctcaaggtaccactctcgaagaggtagtccaggaagccattcgaaagggtttcaaggtatttgggctatcggagcattgtccccgttatcagcagcgggatctctatccagaagaggtaagctcgaggctcatcacactaattctgaagttgatgtgagcttacatcatatcaatctctttatgattcgcctgctagtcagacttgacgcccgacgacctgtacactacgtacctctccttcctggacgaagcccaccgcctcaagaaagagtacgccgacaagatcgacctcctcgtcggaatagaatcggagtatatcacggatttggatttggagggcatcaagcgcttgatgcaggaacaaggcgagcggatacaatacgtcgtcggatccgttcatcatgtcaactcgatccccgtggatttcgatataccgacgttcgagactgctctcgccgattgtggatccgcaagagattcgccgagcggattcttaaaggcttacctagatgatcagtacaaaatgttgaccacgctcgaaccggccgtcgtagggcattttgacctctgcaggctgttcgcgcctgaaatccggttagacgccgatccagaagtctgggaaaaggtcgtccggaacgtcgactacgtgatcgggtacggtgggatgtttgaagtgaacgccgctagtttcagaaaaggatgggatcaagcgtatccagggcgtgaagtattgaaggtcagtcctcgttgcaggcctaaagcgaagtcgatgtcagactgaaaagaattcggtggtgttcagttgatctcatcgaaatccggtcggctgtgtttatcggacgactcgcatgggcccaaagctgtcggtctcaactacctcagaatgaaggattatttggcggaaagcgggatcaaggaaatttggtttcttgcggatcgcttggaaggtcaggctgctacgggcaaggcccaggccaagcgatacgagggagattgggcgaccgacgtcttttggggcaaactggcgacgtaaaagtaggacctcgcctgacgaggatcctggttgatcctagaaagaaagtgccgcaaaactgcacaacgtagtctacatatgaattcttgtattgacgcgaaagaatacatccaaactacatgtccgtcatctcggcgtcgttctgtgcgacatcgtccatgcccgcctcgatagcgtcttgctgagcgtccaaggcgtcttgcgcatccgcgaccatcttgtcctcctcgagctataagcgaagaagtgccatctgttagtcttaaaagctaatgaagaagctaatggacagcgtctcaccctctcaatgtttgccatgatctccttgcgctgctgagcaaggtcggcgtatcgggactgaagatcctgctcgcgcttctccaacttggctacctcttctcgcttctcgtcaactcgtcggggtccagcagcttcttctgcggcacgcaaggcggagaacgtgtcgtaatcccgtttctgctctcggagagccgtagtggcagcggagatacgagcgttgagcttgccgttgagcatctggtagccaccaagctgcttgcccaacttcttttccgacttggacgcctttccggcttcagctcgcattcgttcgtggagatcgtctacaatcgcagcgtagctgctgttttgttgaggttccgaaatttcgcgcttgtccagccacgatgcggaatcgtgatcaaagatcagattttccctttcgacgctccagccactagtcataaagtcttggtcctcgatggccatggtatcgatggtccgtcgcaattgggattcagaggctcctgggaaaccgagaccctgagccaactccttgtggatctcggctcgggccgcactaagttcctcgtcctctgggatttcgtattgagacaccgtgccaactggaacgctcgagcctggcaggggatgagcaatggcgtcgtgcaacatcaattgagccaactcgtagtcgatcaattgacatgcctcctgcgcctcggccggttgggtctgagacgcttccgacagctgatcaatcaatctctgcaagttgacgctgacaggtcggggtaggttctgcttgacgacctcgcttcgcctcgcaagaactcgcttttcctcctcgattcggagcttctccagacgagcatcacgctcggccgcgtcttcttctgacaagatgagttgctcctcctcctgctcgtccagctctggctcgtcaaactcgaagttgttctcgggcttgggcaaactagcaaaaccagctagcaacatgcgcttggcctgctgttctcgcagtcgaacttcgcgaggagtgtctccgtagctggtctcgccatcttcgttgatgctcaagttgtcccgcataggagtcctcatgggcgtctggccattggtggttcgcggcgttgctccgaaatcctgaccagctcgcataggagtcgcaagcgggttaggtgtcgacgtgacctggtgatggggcgtagcaccgtcgaaaccggttccttcgcccgaaggacgatgcaggggggtgttctcgtcaccaaggagaggggtctgtgccgccgtcatgttccgcaagtttagagcttcagccatgatgttgtcctctgtaatgcgattggggttagcagatgcttcgatgacagggcgacatcgacaacaaaccttgcggagcagttcgaggcgtcttggccgtcctggctcggctaagggcatcatagtctccgatcaactcgccggcagctccctctccgccgaccatgtctctagcggctcggctgctcctgccgatcttgacgatgtcctccaattcggactcgccgacctggggttgaggcagattgagctttctccgcttgatgatctgctcggcatccttcagtttctggatttgggcttctcgcgcagcgatgaattgcgtgttctgctgagctccacccttgtccttcttctgcttcttcctcttgtcctcttggtcctccaattctatccgacgcttcccctcgagttgtcgaagagactggccaacgggagcagcgagccgcttggcattctcatcgttgacgtcgtagaacccaggagcaggttgcttgttgaacgggatgtcggcgttgtactgagagcaaaagtgaatgtaagcgccaatcgcaccgaacaggtagtacaaaccacttacgtccataccagcattcttcttcggcttgtgtcgaaggctgtttcggcgaagccactctgtcagtgagagaaagtcggcatggagatttcagacaacctacatgatgccagcggccttcatctcccgcttcttctgcagcgcagccaatcttcgtgcctcctccaattgcctctcacgggcctttctcttggcctttttaccttgcgtgttggccagacgagctcgagcctctgatagcatctccttctctgtgaagccgacggatcgaaatcaggatgagattgttctggcatgatcctgtagagttgacttaccatcctcgtccatgtcaacgggatctggcctggcggccttggtctcctgatcgacgtcgacttcaccaggcttcaggcggcgaacatcgtccgcggcgggcgctccctctcctccttcgggtccggccaggccaagatctgacgcctcgcgggcctcggcctcgtccaacagcttctggtatcgttctagacactggttcgcggtacggccgacgataggagcgatcgttcgccattgcgttggcatcaacttggctaaatgcaacagcttctcgtcttcggtctgcaataacaacagaacgtaagaacgatgagcggaaacgccacatagtactgctacttaccttggaccattcgacctttttgatagacgggtcgagccattcgaaccatctgttcagtcacgcggccgccgtcagcatcacagttccttcgtcgacggcgcagatgcttctcacctagccttgcattgtttgggagtctttcggacgagcaaggacgaaatacgagcccattgctattgagatatcgttggttagcaggaaagccgcccagctggtaacaaaccgggaagacctacgttctttccatacttggagatggcggccttgaggatctcatcctctgacaagagcaaacgaataaacatcaagctgcctccttgcgtggtgtcacagacgggaacataccggtgttacgccagacaccacctttgatgataattcgtacctatttattcgtgaggtagagatagtcagcaagacctcgtgtagagcgtgtctcaaagatatcgctcaccatcttgacagtttccggaacttgtacgtcagactatgggagacgatgaagatcgtagctatctagaacgagcgcacggctaacgacgttacatctgtgattcatgtcttggtcgaagtcgtcgggaacagctcgacccccagcctgaccttgatcgatcgccttaaatcggtcgagaccctttcccacgcgcgcgcgacgaagatgagttgggtatagatatatatcgctacggaggcttccgaaggttgctacaaaaggctcaatctagtatacaattcgtaggggattgctgttgaacgtagggaaagctagcgtgtactgccgggattctggggcttggagatcggtagcgactgcgagaaagactgactgtcggaagacgtcacactggccttagaaatcgctgtcactgtcatcgacgagttcgaattcggaaggtccaccgacaaccgagatgatctcgcagtcatcgtcggagaattcgggagtgcgagcaccccagccgctactggagggaaccggggcaatcgagggcgaagcctgtaccgatgccgactcggtggcgggagctggagaagctagactggattccgggtccgaccggggcatcaacagggaagaagagccaagttcagacatgtcaggcttggcgacttgaaccctgtgtcaaggagggccatattagtcaggctcctaaagtatacacgcaacaaagactctgcatacctgatttcaagctcgtcaccgaacgcctcgccttgctcgtcatgcaatctgaaagcgccgctgaaagactgttcggcgaccgggacagtcctgtgcggcagctgaatggtgaaggagccgccaggctgaaccttttcgagggtgacggtttcgctgattgatccgaacgagtgaccagagaccaagcggacggtgtagtcgccctcgatcgcgatatcgcccgtgttgcgcatcgtccagatcttggtgaagttggcatttgggagcatacagaagtagtcggggatcgtgacatgtcctacaaaggcgcagtcggcgcacggggtcttgacgtgttgctcgacaccacagtcgacatcctcagtcacctcggctatgatcaactgagcgagagaaggcgcctgagctcgagggacggcatcatcttcgtcttccttttcctcctccggctcggtctggaccgcttgttcatgagctgacctagccataaggttgctatcggcaaagtaggcctgaagatcgatatcacagggtcgctatggtcagggaacggggccgagcttagcgacgcgttcaatgctcttatttcacaaatttcgtactgaccttgaacttgatcatcgggtggctagcgggatgctcgttggtcgggctggcctcgcagttttcgcacaagtcgaaatcgggacagtcaggatgggcacatttgtagcgaacgcccagaacgcgagtctcgcagtctgtccagatggaacccgactgtcaataccgtgataaggccaagctgttgagcaggacaaacttacgatcacaccgaatgttcgggtggtacgctttgtaatcgaacttgcgaacgacgtgatcatccgccttgcgaatcgccaccaggtcatggtgtgggtggtgcttgtcagccgtggcaaaacagttggcacagcagtcccactgatggtacagcaaatattaagcagccgatcttaagtcgatcctggagcggcaatcggcacttacatctgggcattgcaagcatttgtagcgggttcctttgatgctgatcaagccgagtcgccgtcagtatacctatgcttggctgtgcacggcctggtgctgagcttacttgtcgtgagcacagacgtcgcagtaggcatcatgcgactcgactgcgacctcgcttatgggcctattcttgtcaacagacgaggcagcagaggcgaatgcggatttcgagctgtcatagacaattttcttggcgaccgttgggtgtatcgtcatcttgaaaacgtgttcacgatcatgcaactcggcattgtgaacgtagcgcggcaagcagtcgatgcatagatcgaaatcgcgacactgtatcaacaagggatcagtgacccgcacgcgaaacttcagttctggtgggctgactcacattgttacacttgaagtttacgagcgtcggtttcttgtcgcacccgtcacaaagcgtggcgtggaaaataaagtctttatggaagtcccgggtaggcttggcatgagaacggcccgcgccagagaccggcaacttggtatcaagctcaggtttgacatccggagtagcagcagcagtttcgtgagcagacgggacgttttgcttaggcacagcgtgctccaatctctccttgaacccttcttcaaaagtagccaattgaccgcccaggttgcacaagaaaccttcgaggacgtgcttgagatcgctggctacggcgccagtggtctccttcacttgcttctggacctgagcgtgggcggcatgggcagtcgcttgcgcctggatcgagatggcttgcgagagcggcttgacatcgcgcaagaggtcgctcaaggtacgcaagggcacggttatgggtcgaccaggagccgagggaatgtccttgatgtctggaaaggcggcgtaggccgatgggatctggccatagatggggtgatcttcccacaaggagcggggcgacggagcagaacgcgaaggctcggcgttggcataggcactgctaacagcgggctcaagaggaggcaagccacctggcatgcggagtgcaggctccggcgagactcgctgaggaccaatcctcgaagtgtcgttgacacggttgggaatcgcggttgaagcaccggcttctggtttcaccgaggcgtttttcttttccgcttcaatacgttctttcaacctcaaacggatctgctctcggagtcgattcttccacgtctgaatcatactctccgtctcctgtttggcttctcggtttctcttgagttcgcgttcgaccaccggcatgttgggcttgtgaatcgcgttcaacgtgttgagctggatcacaacagccttcatgttttgcttcaaggtggcgacctcgctcatcttttcggcacgcttctgcaagatcaggagtcggccctgataatcttcctcgtcaagcttgtcctcctgttcgacgagagcagccagttgttgctgaagagcaaaaatggcgacttgcatcgtactttgctcctgttcgagttgcttcgtggaaggcaccgaggccatgtacgcgtggaactttctggccgaggtcagctttccattgctctgcggaaggacgtggagggtcaacgtcaggttgggaaagtcgactccggcttgacgataagcattggcagcgtcttcgtacctaaaacgaaacgacttggtcagtgaatgtttgaaactgaatattcggcaaaaagcatccgggctcactcttcctcggagcagacatgctgaaggatgatgtgatcagtcaccgctctgaatggcgagacaggcgatattatttaccctcagaaactttgctccaggaatgctctcgccgaggctcatgtagatatgccaccaagcgataggcatgtcgctagcgaggccaaaggcatctcgcaactgaccggaagaaggggggcgaaaatgatctaatcagctagatgtccaacatgctcactcatccacacatcactgactttagcattgatgatagcatgaggaggaatgccagcagtttcgaacttgatcgtctcggtctgatcctgataggtcgctttgattgtgaacgacatctttaacgtcgatccaaaccgggctgagaaggtgccgggagaacgaaatgaggtcggacgttcttgaaaaggtgattattccgttggtcgatagcgtgcgaagaaacagtgtagtgtgatgggtacagggtcttgtcaagacagaaggaggcgacgatgatggtgttttgaagaaagaagaaagggtgcaaggttctgggttgtcccctttgaaggtgggtacctcctcgctcgtgatctgatcttatcgaccggcaacgcgctgacgacagtctccggacaagaccgatcgagtaaaacggatatgctgatttttgaaatgtccgcgtcgcgggaagtggcgtaaatggttggctacccgccactaccattctaatcgatctcgattccgtcgaccgctttcatttttcatgtaggttcaatcggagtggacgcgagcttcatgctgttgtcgggtttgtaagcctcagtttgcaggagatatggttcgagcagacaatttccttcactcatcgctccgtcggcatgaccatgcaattcccgtcggggtgtaatagtaatttcctgagcacgcttaagcgcctcgagatcgacgactcgggcgtgcgtctcattttacgatgtaaagcgaatctttccaagcgtgtgaactgctagtgatattcgagtcaacgcagacgacgacaatgtcgtcgtcgtcgtccgaagatgacaatcgttacggtgatccgcattcaaggctgtaccatctgacatgaatcgtcacgaaatggctgttataggatggcgcatcgctcgcgattcccttattgggtcatgtcaatgaacggtgcaatctggagtcgtagcgacgccggccaaagaagtctggcatggccgccgttcaagactcaggacggggacggcccctgcagtttaaaggtcgttgttgaacgattgtatacgaccagaaaggctagatgaaatacaaggtggcagaagaactgtcgtcacggatcgttaaatatgtcgtcttggaggtcgagggatgctgttgaaacgcatttctggtggaagtttgggtgttcgcttaggcgtaggtctcacgggcccacttggcggcgccgacgaggttgttgagcgattgctcggtctcggccctgaaaaagaaagaaaaaatcggccaagtcagcacagaatggtcgtagagagctctagacacgatcaaattaccaggcacgagttttcaaaccacaatccgggttcacaatgaattgggaggctgtagaacgagaggaagttcagtttaaagtccttttggaaacatgatcaaagaaaaaaagacaaaaaaagggaaaaaaaaggaaaaagactcacggtccaaaatctccaacatggtcttgatcttggtcttcatctcctcggtggagggcacacggggcgagtggatgtcgtagagaccgggtccgatacccgagttgtatccctcgttcttgaaggtctggatcaacttcatgtcggccttggaggcctcgatggagatgatgtcagtgtccaaagccttgatcgacccgaagatgtcgttgaagtcggagtagcagaagtgggagtggatctgtgtgggcaggaaagatgatctagttagaagatggtcgtggagggctcgaacatggctggaactcgcctgagtcttggattcggcaacggcggtagagagcctgaaggagtcgacggcccagttcctgtagacgaggagccaagaggatcagcaaccagtatcgaacaaaggatcgggcaagagtctcgagaccccccggatgcaaacgtgcccttgatactcacaagtagttgtcccagtcggcctttcggaggggcaatccctctcggatagcgggctcgtcgacctggatggccttgataccggcagcctcaagatccttgacctcgtccctcaaagcgagggcgagctgcttgcactgaacctctcgcgaggcgtcggcacgggggaacgaccagttcaagatctatcgcggcagatgcaagggaggcgcggcggtcagctaggggaaaagcgacgatgtgcgacgccggacactcacggtaacgggcccggtcaacattcccttcatggggctcttgctcaacgaggcggcatacttggaccaacgaacggtcatgggtcccgatcggctgacgtccgagacgatgatagggggcctgacgtatcgggaaccgtacgactggacccaacccaactgggtaaagatgaatccgttcaactgttcaccaaagtactggaccatgtcgttcctctcgggttcaccgtgaacgaggaggtcgagtccgcacttttcctggaatcggacgacggtctcgacttcctgctccatagccttttcatagtcctccttggagagttcacccttgttgaacttggcacgggcgacacggatctccttggtctgggggaacgaaccgatggtggtagtagggaacttggggagaccgaggtattcgacctgggcggctcgtcgagcggggaactcttcggatcgcttcaagtccttttcggtgacggcggcgagacggtcacggacggccgagtccgagtttcgctcaaactctcgtcgggcggcaatgtccttggtgttcttctcgaaagcctcggtggtctcaccgttgagagccttggcgagggtggcgacctcgtcacacttttcgagggcaaacgacaaccaagacatttgctcgtcggtcaatcgggtctcggaagtcaaggtgacgggagtgtgcaacaacgaggacgaggtcgagacgacgactcggtcctgacccaaagcctggatggccttttcggccttggccttgctggcctcgaggtcgttcttccagatcgatcgacccgagacgagacccaaggagaggaccaacttggtgtccttgagggcggcgacgacctcgtcaaactgctggctagccttgtccagatcgacgtggacggcgtagacaggcaagtccttgacaaactcgatcgacttgcccaaccttccaaagtaggtggtcaaggtgatcttggggctgacgtcgacgagctgcttgtagaccttggcaaactcggcaccgagcgactcgcccttgtcctggacgaggacgggctcgtcgatctggacgtgctcgacgccggcgtccttgagctgttgcaacagctcgacgtagacgggcaagagcgagtcgagcgcgctcaaaggctcgtacccggcgggggcatcacgagcggccttggaaagggccaaaaaggtgatgggtccgatgacgacgggtcgggtggtgattcccaactccttggcctcgttgtactcgtcgaggtacttgttcttgttcaacttgaactgagtcgagggggagatctcggggacgacaaagtggtagttcgagtcgaaccacttcttcatctccatggcgtggagatcgatgcccttgtcgagctgctggcgacctcggcccatggctgcgacgggcgacgaaaagcgaagacatggtcagtcaaaatgcacatccacgagaccatcctttgccgacgacctcgccgagactcaccaaaggcgacgtccaaagccgagagacccgacttggtgtacctctcgggaatggcgttgacgacgttggcggcatcgagaatgtggtcgtacaaggtaaagtcaccgctgcatgtacataacaaggcgatgacgacgacgacaacgacgacaaggtcagcgacggcgaactcgtctttttgggcacgatgccgatgcactcacgaagggatcgagtcgacgcccttgtcggcgatcgactgccacctctgcttcctgacctccttgacggcagactcgaggtcctcggccgaggtcttgaaagcccagtaagactcgacagccttcttgacctcacggttgggtcctacgggttgcacgaggaaagaggatttcacagtgatcagcgaaaaaagtagctaggagagaagtcatgcatgacggcgatgatggcagacgtaccgatcctggggaaacccaaaacggcagacttggtagccatctttttggatagttttcttaggggtaggttgtggtagggggtgggggttgtgatgaaagagtctcgacggaatgaacagtcgggatggtttgaggagaaggagagggaaaagcgattgatgacagttaagggaggcgaaggtggtgaaggatgaacgttcaagtagtagtgggtgacacgacgacgacgacgaacgagccaacgtgcggtgtgtcgctgtcgactcctcccaactctcgcccgttgcacccgaacaaactcgacctcgacctccgactcgactcgcttgggacgtggcagcgcgcgaggctcttccccctgtgctcgccccctgccctcgccgtgttttgcatccgccccgactttttttttccagtgcgcggagtccgtggaacgccatcgaaccattgggatcgagggatcgtggggaaatggaaaaaaaaccacgagtagctcatcgcaccgcggatagttcgtcatgcaattccccagtcaagccaatcatcatccctcccccccacatacacactggagctggaattacgaacccgggaccagcctaaccgatgggggatggcgtgatgtgatgtcggcgagagataacgatccccggatccgaccccgcgccgaccctacccaatcaaaccgccgctcgtcatcccagtcgggtcccatcgagacgatcgagcgggtcatcgaagtctttcgacgcgtacgacgcgtttcgagatggacgagaacgttcgattcgtgaccagcgggccagcagccgccagacgacgaccgacgcctcgggctctatgatgtatgatcgattcccactctctagatcgctccagatctggcgcttgccactttacgatgattcgcacctacagtactctgtaatatcgtacacgatcatacgatcggcacctcgcgggcgtttcagccatccgtcgatcgatcgctgcacgcaagaggtctcgaaaaaagacccctcgatccgatgaggatcggtcatcaggaggcactgttcttcttcctcttcttgcaccaaattcaagcatcactattgattaccgttcgattagaccgctccattattgtaaactctgtttgccgctcgtatgccctaccgggacacgtatgaacgatcgtcccgcgccaccctcacccggagctcgatcactcgttcactccggaaaccgcgctgtctttcccgtttggtccttcgagaaattacacaagcgtgtccatggttggtaacatatgattatttcatttcatggtcatgatcgtcctcccgtcgcctcgagacgtggacgaaattgacaaaactcccgatatataggggtggagcgggagagtacactcgacacgtaagggggaaaaaagggcaagcgacaaaaaatgcgaaagtgagggcggggaaagaggcgatcgatggtggaaagcaggtgggcaaacgattgggaaagggaaaaaagaggagcaggggtatacgttgttcgcttgtctgttcgtctcctgttttttcctcttcagatgccccgagcgcggtgatatatatatgtgtgtgtgtgtgtgtgtgtgtctcgaaaagagcgactcgacagagtctgtctagccctcttcctcgctgtacgcgccctcgtagtcttcctctccgctctcgtgctggtcgtaaccatagtcttctgcaccgccaacaagcatcggtaacgtcgtcagcaactcggtcaactcggcggcgaacaaagaacacaacgggccgcgactcacctccaccgtcatcctcttcgtcacccctgatcctcgacagctccgcctccaacgcccggatccgctcgatctccgactcgttcttgccggcagcgccaccacctcctcgaccgcccattccagactttttggaccccttcttcggtccaggctggccgtgctgttgatgtccgttctgaccaccaggcttgggtcccgactttttcttcttgggtgccgattgacccggctggatgcccttgatcacgaggttgtaaagctgcgcgatcgtgttgggcggcaaggcatcaatatcgagctcgatctcgtcgttgtgctgcaaacgtcgcgtggggaaatcaaacgtcagcgcgatgtcccctcgcgtaaacccgccgagacgagcacgacgactcacgttgcccagctgggtcgtcctctggatcaagtcgagcgcttgcatcaacacgtcagggttggcgtcggcaatcttgtcggccagctcttgcttttgtgccaatgtaggagcctggtgcatcatctcttcgccatcagaatccccgtaatcccgcacatcactcggtcgacgaccgttttgcttttttgctttcggtccaggtccgccagtcgcgccggctccagcaccaccgttcttggcaggtcgacccagtttgttgggaggtttcgagggtgcaccgtgaggatgaccgccagacgtaccggccttggcaggcttcgacccggaccaagccgactgcgcgctaggtttggccttttgcttgcccttgtcggctttgatgcggtggatttcgtcgatccgtgcggaaatttcggctcgctgtcgttccagctgttcgagctctacgaatggcaccaggataggctatcagccagagatcttaccggcgcacaccttgcgtcgatggacctacctcgatcaagagctgggtcctcctccacgacagcgtcctgctctgggacagccaagatttccttccacttttcaccccaaattttttgcatttgttcaccacacaagtgtacgggagttccgggcggattgaacgtgaaacagttcttgatcatcaacttgacgtccttgtcgactccagagacctcggcgtattgatcggccgcgatcttgttggaaatggtcgacaagtccataggccgcttgatcacgtcgtggtaattagggattcccaaggcgatcgggtctacaaatcagaccagaccagccacagtgcaggctcagctcgaggtcacgtatgctccgctcgcaatgctcggaattactcaccgactggtacatagaacggcgaagcagccatcttgtactttcccttgttcaacagatcgctaatcgccatcctcgcagccttcatcctcggagtcgcattcagcctgcccttgcctgtcctcgcaacctgggaaataggttcgacccaggttgaatccttcggtgtcggcgggtgaatctcccgtttcggtcgactgctctcgcccgctccaaagtcgtcggatggattacgtcgaatggtcggttgcgagacggacggtcgacgcgttcgttcttcgacaggtaccgatccttgagaccggaaggaagaaggcccggcctgatccaaaggaggaggctgacaggtgcgcgggaaacaatccgtcagctccgtccgctctgcaagtcccgctcagggcgaggccgactcacattctcgttcagtttgagcttttccaactggttctcgaagaattcctccaacctgtccgcgcttacactgaccacatgctgcggtccattgaagatcctagtgttcgcccaaacctgcctgacatcgttgacgacatccgctacgcaagcgtacggcccctgttgctgcccctgctgacctgaagctcccttggacttgttgggcgccgggttggactgtccgagtttctgctcgaccgtccccaggtccatgggctttttgataatggtcagatagtgcggtacgttcagagcgacgggatcgacgggggcgacaaaggcgaaactgtccttttgcttcttgacagacttgagcaagctcatcaaggaccggtactgctgatacgtcatcggagccgttgatccgagagggggtcgtgtggggggaagatacgttccaggcaggtagaggttttgaggaggaagcaaggcaggatcgctgacaggatgagccgggtcgggtgccccgttcgtctggttctgagcttgcccctccgactgttcaagcggaggtgccgaggaacctccagcctgcgccgattcttgcgaggtctgcatcgagccagccggttgctgatcgacctgcatggtcgactcttcctgtttcaatccttgttcgccttcatccttgacacgcttaggggaccgctcgacctcgcgctcgtcgtccgggctagatcgtttcaacgaaagccctgcgtctccctcgggtccattcgtcgtcccagctgcgctcgacgtcatctcaggcgtcttcaagtcgacatccatcttttcgctacgtgcatcgctcaaaggtatgccgctacccatcacacccggttgtacgggagatgccaactccatcgattcgtcctgtcgcaatgtcgatgcggctgcagcggagacgggaggggtcgacgagggtacaggagcagtcgacgcgggaggtggtggtggtggcggtgtggaagcaggaacagggtcggctcgttcgagcttgggcgtcgcagccgaggtaggagatacgagctgactgatggccatcccgtgtgcgttatgagcgtcctcttcggacaatttccctgaaggcgatgaaccgggaccaggaggaggtggtggtaggctgttcgaagtcggagccgcagcggcaggaggggagggtacgggttcgatcgacatttcgctcgtgttcatccttttgtcttgtctaggcggtgaggctcaagcgacagtcaagaccggtcgacgagtggtccagattgcctgaattgacgtttctctgtggaaggtgacgaaaagtttccatgcagacgagcaacgagcaggtatcgtgatgcgatgttgtcatgcgtgtccaagtggtagccaggagagcgcgaaagaaaagaggtaattacatgagcgtctggcagataagaatacgctagtggcaatgaagcggggtggttcgagaacagaaggcgggattgggataggaaggacgggatgaactacgtacaacggcgacctcgacccttattccgcggggctttattcgctcaggaatgaggaaccgagagcctcgtcgtttcccttcgtaggcaccgagggggaaagccgagagcaggatagacgacgtgcggccgttcttgactaggtggtcgagattgtggcagacgacagcgatgggtgatgtgatagcgaccgagaagctcgtcggttgatgacgaacggggatggtaggtagcttgacgaatcacgtgacgacgcgtcaaagaggatagttgatgatgggatgaagaacgagtaattgatgcgcgagagtcggccgtgtccgtgatcgggaaaagatcgagcgtagatatatctctcaacttgttttgagttgagtggtagggtgggtgctagcacgagagagaccgggcaggcgggggagggtcgaaaaacaaaacaatccgttcccgtggatgggtggctgctggcgggcaaggcaaggaagggggaaggggcccccccccgcggcaacgccttgctggtggcaaccgaccctcgcttcaatccgagacgatgaccggccgggagcaagcgtcgagagtcggacgagatgacaatgaggtaccgacgacgcccccggtctgcggtgcgagagaacctatccacctttgccgacttgcttctatctcgctttctttcgtccttagctcgttttggggtcgtcgagaagtcacgaatcgctaccactggccggcctactggggcgctggggccgattcgcatgtgatggacggatggatgggtcgacgggccctcgttgcattgcatgtccggacgaggaatcggatcggcaaggcgatcgcttccgacatggaggattagatccgcatttggactggtagcgcgcaagtgataccggccgggcccgacgggcagacgtttcgaatcctccaacgtgacaggcgatcctcctggagcgagtgatcaactcccggtcttgctggtgtctgggaaagcggcgacgactctagagatcgaccgtgaccgatcggatgcggcgttcttctcccgagcagggaggaacggggggatcttttgggtttcccagtggcagatgttcgcagcagagatgtgcgagagtgagtcaacgtgttgggcgaccacgcgtgagggacaacaaaaaggtttctcgcgactctttgcctagctgacttgcctaggttgtttctgccgaacgagtctgattccgaacctgacctgaacgccatatcgatggatggcgtgtgacgtgtcccccactagcctcctcccctggccctcggctcgcgtctctcccctttccctttccctttccctttccctgtccctgccccgtagcctgttgctctcgaaatttcccttctttcgcgcgttccgaaccgtcgaaacggtcgtcgctggatggaattttggatttcggaagcgaaatttcccactcactcgacctgggctcggccaaggggagattgttgacaatcaaagactagcgagagaagtagcttgggttaggttaggttatagctggcgtagttggtcgggtcaggtcgcatcgctgcattctattctattcatgtgaatggtctgtttcattatttattcttattgctcctacaaacgtatcaacgctcagacgacgctcctttgcatccaacaaccatacctaactagtagctagtagtgtactagaccatccatccgtccatccatctctcgcttgatcgcgcgccaaaacggttgcggtacctttttcacagacagcagcagcgtcttggttcccctgacgaccatctttacaccacacacccactctcgcatactctctcaccacactctttcgcgctggagcgttccatacaggatcaaacgactccaactctacacgatactcgactgccggccagtcaaattgaatcagctcgcccgtccgagccgaaccaccagcggtcactttcgtgctcccctcctcccccccttagtccctcgcgcggcctctaatctctagctactctagtcgtcgcggtctttgatcaagggacaatcagctcaaagatcacgtttacaccgggttgaccttgacgcccatcggtatcctacccatcatcaccacaacgaccacaaccacctctcgtcttgtctgaaaaatctcgctcgctcggaaagctttgaatgtcacctcaaaagatcgaccacgagcctctctacatcgacaccgaatctacccagctctacgatccttcttctttccccatgtcggcgagccacgatagcgttcagagcggcgtttcgaccgcgggacccgtcactcccgaactcatcaacgagagcacgtttggcatgacggcgaggacgggcaagagtcccgtgttcgtccaagaaccgcagtttatggatcaacgaggagaagcttccgcgttcaacgacgagggcaagaaaccgaggagcatgagctcgcaccgtctaccccaccatcagtttggcgcagggaacacttcgaccacggcatccagttcctcaaactctcttccctctgtgaccatccttggtggggagaaacgacctagctactcggacgacccgtatgggaacgccctaccccacgcgaggtcgatcaacctcggggacgatttccgggacgtaccttttagcgaacgggatcacaagttcaccccgcccggtagcgtcgcccatacgccgaccgcaccgggttcgttgtcctttgacgagaaacgtcccttgaccaacggcgcgacgacgatgacgaacacgggggatcaggcagatcgaccgaaaaagtttacagactcggcggcgtactggttgatcctgtatttcatcttcaacctcggtctgaccttgttcaacaaggttgtactcgtcaatttcccatttccctacgtgagtcgacgacgattggtcggttagggccgggcgtgttgtggtgggaacggatcgctaatctccacgacgtcgcgcttgtgttgtcgaatcagactcttactggtttgcacgccctgagcggatgtgcgggttgttatatcgctctggaacgaggtgctttcgtgagtggcccgaagcgtcagcgtcgaatgtcaaagtcggccaaagctgatcgtctcgcgacgtctcgccgactcgtcaggtgccggctcgattgacgtccaaggagaacctcgtcatgggcgccttttccgtgctctacaccatcaacatcgccgtcagcaacctcagtctgcacctcgtcaccgttcccgtaagtcatcacgatctgcatcgtcatcggtccgggagcatgaccaacgatggactgacactgaccggccgacgactcgcagttccaccaagtcgtccgagcgtcgacccccttgttcaccatcctcatctcggtcttgttcttccggggcaaattcagcgcgatgaaactcatcagcctcttgcccgtcatcgccggagtcggattcgcgtgagtcgaggtgctagctcacaagggccagaccgaacgatcgcaactgacgtcgaaaacccccgactgccgatgcagtacttacggagactattcgttcaccgcttggggtctcatcttgaccctcctcgggacctttctcgctgcgatgaagaccgtcatcacgaacgtcattcaaaccggtggtggaggtcggctgaagctggtgagccgcaagtcaggagcatcgcccgagccgttcctaaactgagagtgacgcgtcccgatttcgcagcatcctctcgacctcctcatgcgaatgtctcccctggctttcattcaatgcgtcatctacggctggtggtccggcgagctcgaacgggtcagacgatacggtgctagggagatgaccagggaaaaggctttcgccctgttcatcaacgggatgatcgcttttggactcaacgtcgtcagcttttccgccaacaagaagacgggcgtgagcatcgtggtcgaacgagggaaacccagtgtcctgaagtactgatccttcaccgtttcctccctgtcgtcaggctcttaccatgacggtcgccgctaattgcaaacaagtcttgaccatcgctcttgccgtcttcctcttcaatctcaacatcaactttactaatggtatcggaatcgctttgacgttgatcggaggggtgagtccagagtcgatactatcaaaggcgtgacaagctgctgacgagacttgtctatccctctgccagggctggtacggatggatcgaattccaggaaaagaacgcaaaggcccgtctggcgcagcgtctcacaaagggtccttagtctgcctgtttcgactcgccgccgagatgtacataggtcggccggccacaactctagatgcatattttcccaattcatccgtctcatcctcgtcaccttttttgtatcatacgaatctagtcatcctatactagacgaggtcgcgggctcgcaggtccgggcacgcgccgatattgtacatttgacccatctttacaacatacgggcggctcatccgccccgtatacatcaattcgcacgttaaccgaaagcagcgaaattgatccggtgcatcgttttccgtcgttcgagctcgtcctctcgctgacatcatgacggctcgtcagctagtccagtcgagcaaatgacgtagttccaggctcaccttttccgcatcatgaagcaggtaagtgacaccggcaagaatcaagaaaattatggttgccgttcccacgacccattgcatccatttaccaggttggagatacagcgtcttgtgccattccgaagaggcttcgcgaacctcggctgagccattggcaccgaacggcaacggcggattaatgacgatatgagaattaggtatgacaccttcgatcgtggtatagcgctcaaggtcgtgtttcgtagacccaatgaagagtttctggcaagatcaaaccggtcaataactatgcatttgggaccttgactttttcactcacttcgatgtaattgttggttcgacccaaaccaaacagagaatatggcgcttgcaaagccctataagctgtctgtggcatctgcgggactttttagagcggcggttcaagtcagctgtctcgctctcgtctcgcaactgtatcgtatctcactttgggcaggaactcgattgcccgcagtgtccaagatggtgaacttgacgttggcccctggtagattgctcccgtatggctatttctccagaagatttagcggtggtcttacgatcatctccgtcaagaacgcttacactatacgatttgccgccgtgtgcgctgacgcagatgtccccttgacaagctccgtctagaactgcgagctgatgcatgagaccagaacgtggcgaaatcatccactttgactttggaagggacataccaagggctttcaaaaagaaggcgtcatgaaaggcgttattgcgaacaaaggttatccgtccagcatcctgtttgccggtgcgctcaaccatcagatctaaagtcccctaaggagtcaaatcgaactaatgagcactgcggacactcaatctgaactgcaacgcttacatcttctccaacgtccagccaagctgcatcttttgcgtcccagacatcgtaaagagaatcaagtccggcctcttcagcaaccctgaaatgacgtcgttgtgctctatacctcccattctggcaagctgcatccttctttccgcaagcgacattcttcaagattcggacttggactccaggattccgaccacctccaaagattcccccagacggaggtgctgccgtgttattgggtacgagtgccaagacgtctgggaagccatcgatgttgtaatccccgatgcgcagcggcatatgtgcggcggtcttcgatgtcgaggccttcggttcagaaaatagcaatgaagtcgtgccaggaaaaagagacgctattgggatcgtagtgaaagactgtatgaggtcgttcccgatgagtctctttgtcggcattcacttcattatcatgcgagctaaactcacatcgctcgtatcactcaaatcgaaattgaaggcctcatccgccgtgcacaggtcagagggttggcggcaatcctttctcgcaataacagcggcttgagacagacccgccaaccaactattgtctgacgtcaaacagagaggtttctgcttgttgtaagcgatatttatcgagcaaccacgtccgatgccggtcgtcgaggacacagatgagcacgtcgggaagaccaaatcgattgttccgtcgcgatctacatataaattgagggatgagcctgaggtgattcacccgtgtaccaagcgccaactaagcttacccatatctgcgaaagtgaccgcgcccgaaccggctggcaggtcccactctccggcaaagtggaacccagcagttttccgatttcgccaaacttgaaacgatcgcttcgatgccgtcccctcacacatcaagaaaaggtctatgaggaggtagaaaataccgctaagtcaatatctgtgtgggggagcttggaggctcatttctcagtgggcttacctgccaaacagtccccatcgagatcaatgaaagcattactatgaggagctgctagtcgacacagcttcgttggcggctcaagagggaccttgtatctgctcatacaggctgtatcagttcaagggattcgattgatgacagccatgaatatataagaattgcgcacctctcaaaggcccctttggactctttccacatttgtagggactctcccgattctgtctggcccatacccagcaagtccggttttagatctccgtctgcgtctgcgattattggttggttttgggtgaatcctttgatatcaataccttctttggctatcatgcaagggtttcctcaatattcgctcgtcccaacgttctagggatgccgctcactcggtgatccgtcttcgccttgaagatacaaagtcgctatcaagccatctccacgatgagcccaccaaccctggtcggagctgtcgccggtggaaagcagcagcacatccagcctcccatcctgattgaagtcggcaggaatgacgttttccaccggtttcggcgatgacagctcatgtatcagtttgtagacctgtccgactgcgacgaggggattcaatgtatgaatttaacccaagagctcttgattctgggatcttacctgggtcaaaatgatggatctggacctgcgtccggctgtcatccaagacgaacaagtcgaggctgtacgtatacggagcaatctcgcttaaccttcgatctcgcagaccgccttgatgtgagcaaaaaactgactattgatctccatcccagtcacccagtgctgctacgttgcccttgatatcgagacccaagctaccgctgttgatccagccttcaggcgtatgttgtcggtcaggagacggccagatggccagtgctaccgggcaaagcgccgagatcgatataaggcgcgacaaagggccatatcggaaccacatgaagtatgcgacgtagatgagcaaattctctgcgtgcctagtatgttgatccagcctaagggtcaagggcaatccgattaggttgaggtgaaagaagtcctcgctgagtggatgatcgcaaacggatgctacggccgggcgggacatttgacggatgatgatatagggatgtttactttgtgagatacacggtaggttgagaaccctcctttgctggatcgaatataacaggttttgattcgtacctgactactactgatcaccagccctgtgccagctcaagcagctgtagaaggatacagtctgacccgacacactccttggattcacttctagtcgagcaaatcgtgacgtcgccctatcacctcgttcaagagccgattggtcgacgggatgtcaatccgcagcacataccgaaggttgctcaacaaccttcgcctgattccggacagcgagatcaggtaagcttgttcttatctactctcggattgatctgactgccgtttattctgtctgggtgtctaaggtcctactactattatcgctgccgatcactggcaaacgctgtagtcgatagtacgcagtatgggccacaaggggaagccgttgaagcaccttcccgagatccttcacggttgctttcaaagctcgaaaaggtgaactggaagtttatattatgtgctttggctctgttgatgctgaaccgatcctcatataggaaatgcggtcggtcgaagaggttatcaaaggcgataccacgaaatatcggaggatgatggatgtgacctatgcccgccgtgggaaacggcgatgggactttctcgatgtgagctcgctttctagtggcatgactatgacattcccaagctgaaaaggttcttgctgcttgtcctgctgacagacaatcttcccactgtccttacaacgcccagtgatagatatttcttcgggccttgctcgacgatctcagccgccttcaccgtatcctgcacacatcgagccactcgtccggacaaagaagaccatggacaatgaaccccgcgcgagcttgaaaccaccaactccaaggttgattgcaaacaggctatgggaagaaaggtcgacggaaatcagcaaaataagtctccctctagcgttgcggatctcggtccgtaagaccggcaaaaacagcgagggaaagctggacgagctacatcaaagatatctcaatcgggatgagatggagatgttgatggtcgggctgactaaaaacgaagcccagcgcttgcgaagatggttcctcctggcggaccggatggtggagaacctggaacgcttgaaagggaccacatcgtatccccctcctccacgggtagcaaggataggaagagcaacaagcagcgatccagaaggttcccgtgtcctcaaacggcctgccggaaccagtctcgctataccgatcagaatcatgcgcaggctgtatgggagattcgtggacgaattgccagtgctcattggctcgtaccaagacccaggacagggcaagaagacgaagcaagacggcgccgtcgaaagcataaggccccgcgtgatcaagtggcgatcgttacctggcaaaagttccgtcccagagatctcggtgatgagcgccgaagaggcagaatggatcgtatagccacagcgttgaccgtgtgcaatcgatcaccttcgcgatcgatgtcttgttggactacccggatcatggcggttgtcatgttcatactctcacccatcgcgcacttgacttcggattctcccatttcgcaagatcgcggtcgtttgcccctgcatgatgaaggagactatcgggactgtatgaacatgtctttgctttgatcacgatgttagcaagtaaataggcagagccatagccggaagcaattcttcgtttgaatccgataaaccggaagtatattcattgcagcaagttcggataattgtcgacgctagcttccacctttaacggtcacctactcatactactctggggatgctatgcgctacaagcacaatctgttcgtctatagctccaccgtctccatagattcagcttgcgagatacacaggaatgctctgcttcggcgttggtgctcagtttcgcaatcgagctgcatcaatagtacgatgcagccgagcttctttgccttcaggacgtggggttgaatggcccacacatgtgcggaaaggcgtgcgacatctgacgaacaaaggtcggtgaatagagacgtcgcaaagatctggatcgctcgactgatctgttgtatacccctatagctgagcaggacctcgtcgtagcaggtacctcataccgcagggacgcatggacaaacacccctgcgacgattctttccaaaattccaaggcggttgcacgagcaatccgatcaccctatcgggatcctccgatctctcatcgaaggccattttaagggcttcactcctgtctctccagcagctgcggtcgtaactaccaaggaaaactttgacgaccttggtttcgctccggatcaccccggtcgttccatgacggattcttattacctcaacaaggacaacatgctccggactcacacttcggcacatgaagtggcaagtttccgagctggacacaatagctggttgttgtccgccgatgtctatagacgtgacgagatcgactcgtcacactatcccgctttccaccaaatggagggtgctcgggtatgggaacagagcgatctggccgacctcaaacgtctgaatgcggagatgaagaaggagctagaggcgtgccccctggtcatcgaagatattcaaatgacctcgggagacaacccctaccaagcggaacatgaccctgaattcgcggccgaagttgctcagaatctcaagcacagcttgaattcgctcatattcaaactgtttgggcaaagtcgacaaggggtttcagcttccgaacaggaacctctcaaggtcaggtggatcgaagcgttcttcccgttcacatcgccgagctacgaagtcgaggtctggtggggcggtgaatggctcgagatcctgggttgcggggtcgtcaagcagcagactctaatcacggccggtgagtcttttagccttttttcccgaccacacattggcttgaccagcactggttatcgtaggtgtgcccaacaagatcggctgggcttttggacttggactcgagcgcatcgctatgattttgttctccatacctgacatccgtctcttctggtcggaagatgctcgattcaccaagcaattccgtgccggcaagattaccactttccagccatactcgaaataccccccttgcatcaaagatcttagcttttggttgcctgaaacggcctcagaagaacatggagcaaaggctgcaggtggaggcggtgccgtagttcaagctaggaagcccttccatgagaacgacttttgcgagatcgttcgcgacgtagctggggatctagtggaaaatgtcaaccttgtgagcaaatctcgctgttcagcaccgtctaacccgctaacttgatcgccacgtcagattgacgagttcacccataaaaagactggcaagaagagcaagtgttacaggataacataccggtcaatggacaggtcagttgcaggcatattctctcgatgcaaccagtcgggaactgatgcccatcctttcctcttactatcagatccctttcgaatgaagaggtcaataagttacaggggttagctagtgagcgcctcgtggaagagatgggcctggagctgcgatgacaccgtcgatgctggccaaataacgaatcggaataacgaatgcacacaactcaatacaactttgatgtaacacataccatgccgagccgtctaaagagtcgctggaacctggcatcagattcaaccacgagctaaactggccgccatgttgcccatgctacccagccttgctaacgagtcttcctggatttcggcttcctcgatggtatcgctctgagcaacctgtgagggtgatagaggcgtttattggcagcgctcgcaacgagccgaccgtcttcgactcaccactcgtagcaccgctttcttgctggactcctgtatctctccaccaataatcaattcatccaggatctgcacacaaatcatgatggagtcaggtcgagctaatatggttgcaaggtggagaattccgatcactcacggcataggccttttggaagttgaagatcaagtccagttcacagacgtttccaaagtatcggtccaggacttccacatagcgatgcacgatttccaaggtgagtagctcgttgtcgctgggagagatggagcaaatgaagaagagagaagcgtaacgacggtagatgatcttcgtatctagcgtgtgagaagacgttaaccagcaagctgctttagatctacggtcccgtcccgatcgtactgacctttgtattcgagaaagttacacatccgtgtgcgacgggctaagacgagctgagtcacatccttgacaatctttgcctttgcctttggtggcagcgtttggaaccattttgccagtctgactttgcctgttgttctttgaatatcagtagtcaattactatcgtagcttgatgggcagtactgaccttgtcggctaacgagcatgacatagttgatcatcttggttcgtgagctcttggtggaaagactgctagctgatcggtccaggtaagaccccggcattctcagacctgtggaccatatacacctaaacatgccaaacaagggtgggcaccgtgatgctcgatgctctcgcatgtcggaacctgaagggcgacgcgcgcggaacgacaggggaagctatcgtcatactggcagtggtatatcggctacaacgaggttcaaacatgcatacagcccggcggtcttgactagaagagggagaagaagatgcgagaatgtcggtgcgggaggagcgttacatgtgtaaggagtctagagcagagacgacataggcttgcttgacacacgagacttctacgacccgtcttcgagaggttcaccgataccatccgcgctacggggcggtaacgatccgatcagctcgtcatgctgatagacggtcggcctctcgagtttactcacttgatggaatagatggcttctgcttcgggcaactcgggtgagtccacaatcttggctacacgagtagcacctcgaccttttcgcagagacagccgtgtcgttgaagcgtgtgccatgatgttacctccactacgagacggccatagctcatcagcgactgctgaaacgggaagagataagaccttgacttacatgggcttttttgggtctgcaccggcgaacatggcaccgtctacctgagctacgacctggttggttacaaccacggcaactccgaactgaggatcacgagagaatgttagcttataggctgagctgaccgatcacattggtactgacttcatctgacaagcgcatcaacatcctcaggaacttcgcgagatgcatctgtcgtgctgacagctcgcctcgacccgaaaagtcggttcgatacagcgaagtacacgagtcaacgatgagcagggcaaacctggacgtgccatccttcatcaactgtccgtattcttcccgacccacttcgcgctctcgtcaaaactcaccttgactctgccatcatcgcactggcctggatcaacaagctcaactgatgctcggcattgtaggctcgtgcataagcgatattgtcaagcacctcttccccgttcaatccgtaacgctcagcaacggccaacatgcgcgcaggtcggaaggtcccttccgtatcgatgtagagacatttcccttccccaccacccatactgatcggaagttgacatgtgaccgcaagcgtgtgacagatctgggacttgcccgttcggaattcacctacaggtccgaaatcagaatggtcagatctgttcatacttgacagacccggcgcaagccagagagaggtgctcaccatatagttcggtgatggcgccagtctcgataccaccccccaaaatcgtgtccaagccggatgcaccggtcgtaatatgcacgagctcgcttcgcctggaatgtatctcggtcgcggtggtgaatcccatcggtactagcttgcatgctgagaacacaacgttcggaccactccgttcagatgtctgaaatccaaccatcaatcaagatggaacgcaccttcggtcaaaatcttgtcggccttggcttcgctgattcccttgattgtcaacagtgtctttttgggtgtaaaggcgaccgcttcaatagtgttgagcccagcatcttgaagcttcttggtgtctgatgctgaaataccggcttcctacaggtttaaagagccatttaatcaggatgttgtcgtttaaccagtgaagtatgggtgcttacctgtaacttcgcgactagcaggggtccggagatgagagcctcctcgtcctcctcctcgatcatgtcgggatcttgctgttcttgagacatgtttgggtctgactgcttgactattggcctgatgagagtagctagtaattcaacgtctagtagctttgatgatagataggatagcgatttccaggatgtaggtggcggcagaagggggaaatcaattgtgaggggtggaggagggtgcatcgaggttgatcgaccgactcgacggaagcaaaaggaaacgagaaatgaaataacacgatggacgcgacgcgtcgatgcgttatcaagtcgttcgaggtgctcaatttatgcgttgttgaaaactgtgtcatgtggattacgtcatgactactcgagagctcaactagcttctacaagctgcagatgctagacctacaagccttgtccgaggctgctttcaagtataccgtgtgtcatcttctcgcttaggatctcgacgaatccctaaagtcaattccctcaaaccattcgcgattgttatctgaacacagcaaggcgttattccacacgccgggatgatacccgcatcgatcctcaagcatcggggggctgctgttcaggctccttcgacagcacaaaccactattcccgtcaactataggaggcaggaagaccccaatcgacgggtccgaggtcatgagtcggattcagccttcttcatctttctcacaaccttgatcagactcgcattcttcccgttggtctcaccttttaccttcaaaatgacgttcgctgactgacaactgttacaatatcagaattacctttcctattcgaaagatatatcagatcgctacatccccgcttaccatctccttgacggtcaaatcgattctgctcgcctcgttgctttttggaagcgggatactctcgaccttgtccgtcgcagggacctggtacacctggggacggaccggcgctgtagaagtggaggggtggttaatctacgggcgagtcgtcagcacctctccgaacaatgttgaacggccgctgatcctcctcatccgactcgcaggtccaaaatcaatcccacacctcatacccaggtcacgttttcaccgacaaagctcttcctgcaagatgtcgcttacgacgtggaagtcgagttggagctgcttcgtccgagactcgggagcgaggaccttggtgagtagatcgctctcacaaagcgatacgcaaggttgaacagtaaacctcatgacgatacaggaagcttcatggtcaacctggacttgatctcggagaagactggggacacgattcagacggtctcgcagccagtacgacgcatcaacactagaaccacagcgagcttgtgctgacctctcactccttcacagtgtctccccgccctacctcatatgtcacctggcgtactctcacgcctgatttcggttcctcttgcactctctcccctcaatctctactccttcgtgccggtaccgaagattacatccatgaatcctttcaaactctttggtatcctgagtcgtacaggaaagaagagaaggacgggcaaggtggacaagaacaaatttttgctcgtcagacccatgattgaccacgaagagggtctcgtaccgaggccgtcagggagaaaggtagctgatcgagttgtcggcggggtcgggatttcgattggacgggaggacggtgcaggtggtatcaaaggagaagtcaagactggcggttgggtcatcgtcagattcatacctcgggcaaccggattgaggtgggtcacgtgtgctggatcttgggcagaaatttctggctgaacacgatctgcttcgtggcacccagatggctactgacggcacattggctgatcccggccatcgtcctgcccccgattgctttcggactgaccctcacgtcggctctcatctcgttcgttatcatctctttcatattccgaccatcatcaaagcccgctcgtcccgcgaggcgtccgatcgcctccaagatgccccagcaagggacactcttggacggcaagaaatacgataatgaccccacgggacgtcgtacggtcagctttgcggaatcggatcctagcgccggtagtgatggcggagtctgcgggctcgaactgaaggcgaccggtacagacgggaatacgttgctcgctcgtcccgcacgaacaggacagatttataccgaacctgaagagctcgacggactcccccaaccatccaccccggtgaagcgtaccagtgggcaagcgagcggtaaaactgttcagaagagtcctgcgccgtcgacgatgattcagcgcagggccacagttgagcggcatggaaatagctcggcagatgacgcccaggagactggtgtacgtgaatcacttggacttgaaggagaggaaagcttggaagatatcactacggggacagagacggaaacggagacggcgacagatcgagactgaatagctgttgtacaatatgatacctttgataacacatgaaccgccctcacaaacgagattctcaaacgcggcgatcacgctaggcctgcttcgatccgcggtgcgcagttttaatccgttcatcgatgcaaacgactactcagagactctcgaccgaccgatgaggtcaatcacggacccttggcagcgtagtgtcaagggcaagatgacatgccaacgacatctatggacagctgcatacaagctagcaaacatatcgttcggctcgcacactaactagaaaatctccgtcatgtctcaggagaaggtgagattgaacgacgacacgaatagtaggaattcaaagcttacggcgcttcttcgtcttctcagctctctatatatcccggccccccaccaaaggtggtcctcgtcgaggagcccaaccctttagttccgcacgtcaaggtggcccgagagacggtcagcgatatcctcggggacgctcgtgtccaggtcgaccggggcgttgacaagtgggtcaagttcgaaaggagggtcgagcgtaagcacacggatcaccaagactcgggcggagttgccctgatgctgaattcgagatacataacaaatttgcaggtgaagtcaagtcggttctgcccaaggatgagcctttgactcctggtatcctctacgtcggtgttgctggacttgcgggatctgtcttggctcgaaacagtaagtacgggatgagccacatgagatgactctttctgatcgtgctcttcgacttcgttatcagggaacattttgctacgtctgaccctccctcctctcctcttcgtctcggccgctccctatttcctgcccaagacctcgcggaacgtccgacaatacctctccaacgtcgaggatgcgcatttccctgagcttgccgctcagcataacgagatcaaccgacaactgtcctcgacattctcctctgccatttaccgggctgagcacttgtctgacgatgtccgaggactcggaggcaagatcactcactcgatcgaggattcgaccggtctgaagctgggagacgctctcggtcgagccagccacgtcaagtcggatgtgatgcacgagattgagaaaaggcgagccgccgaacaggtcaagacgaccgctaccttggaagaggtcaggcagggtgacgttcagagcgtcaagcctgtcgcgatcatcaccgaggagatccccgttgccgaggtcgtcgcgatcaaagaggctcccgcgcagacgacccctgctttgggacagaagaagcttgtatagactatgcgaatctaattagactgaacgacaatatatggatggtacaacccgaccttcacgttatgcgacccctttgaaaggaaagtcgacaaggccctattactttgcgcaagcctgaatgacttgagcttccgctttacgccaaggttcgagaagcgcgtcgtatgtccttgcaagctctcgatcgggctgcgcgaccactctgccttctgcctcggccatttccttggcgttcctactattcttgacaaactctgcaaactctacgtcatcgccatgcttgctggcatgacaccaagctgctcggtaagcgcctcccatagcacaaccttgagcgctccctccggcgtagatgggcgcattgagcacggagctgagcagagaggtgatgaccgggttggcgctcgccccgccagtcacgtagatacggcggaggctcggcgagtctgcgggcaagagctggttaatcttggacttgaagctcaagaattgcgattccaagatcctcctcgcgtccgattctgtccaattcacgctgtcaagggttttcaagttcagaggttccgacttcatcccaagattggcgtcgaaacgatagagcccttgcacatttctaggaatgatctcgtggtctcggaagtagaagccaaagatatgggcgtcgcctgacgtgaggtctggtgccgcagtgtcttggactgccttgttgaaagactcccaagatttagtcgacgagccgttgagaccgtctcgtaccatctctcgggccaaggagccgttcttgtagcagagcctaagaggagagatcgtcagacggatatttattcatctgcttaatcggactcacatgcccatataccgttcgttgccgttcttgtcgtctccagcagggtgcgggaaaatatggtaatttgggtgcgggttgtatttctcggtcgcgagaaggacggtatctgatgttcctagcgagacgacagcatcacctctgccaatatgaagctgttaactttcgcttcgagtgaatagtgtcaccgtggcgacttacggtacgagggcaaaggatagcagagtcgcagggttgtcgcctgtaaagtaggctacttcgcagtctacgataatcgctatgggtcagctaatttgtttcggaggctccatatataatcgttcttaccagatgcgaatccgtagcgatcctggaaccacttcccgatcttgccagcgctctttcttgggtctctttcgacatcgcccatcatacgcgtgacctgctctcctgaagcgtcggcaccgacgatcgaaccgagcaaagccgagttccattttcggtcggggatggaataaaggttagcgccggacgcatcggcctggaaaaggtcgagggggagtatagtttacgtcagcccggcgatcctgactgacgatatggtattcttgcggttttcaacccacctcatcgaccgccttgacttcgccatccgagcataacaaggtagtcaagaaggcgctcaggatgcagactcggtcggtcttgtcgaacacctcccgattcgtctgatagacctttttcagctggggtccagagaaccgctcgtgcgcagaggaaccggtaacctgagccatggtctcgccgggagtaccctttgaatcagaagctgaagtagagctctgatggatagcttgctccatctcgcggcattgcgaggtcgtggtcgagtcttgccagttcgtagcgaatggcgaagcaaagacttcggacagttgtgtctttaaggattcgcttgaggacagtgcttgactggcggagcagcacttggaattgagcaggacaatggcatgttgagcagctgctccggagacagccttgacccgcgaaaagtcgagacctctaaagtcgaacgaaacgtgagctcgaacctcgtcggtcacctgggattacgaccgactcactgagacttcaagttgtcaaagaccttctccatagcttccacatacatcaggacaggcgccaagaccgatccatcgtctgcgacaatgactccgctcctggtcttgtattctgggaggtcatctgtgaaatctagtcgatgctcatataacgtgttcagatgctggtcgatgacgacagctttgagggcctgtgtgctgttgtcaaggccgatgtagagtggagaagtctcggccatggtcgaacaatccgatagtatctgatgatccgattctgacttcttgatgatgaagaaaaggctgaattgccggctagcgagtccctgatccctgatcaaataagttggcttatacctgttatgcactctggtatcctgtttcgacccatcggtgcagcccggtcgctctcggacagttttcggtccgatagatggcaacgactaatacaccgaagggtcgacacgagcggactgtcaaacatggtaatgtccgcggacaaaggtgaaacatttcgaccgtgacgggctcactctaaaagttcgattctctgtcattcccggcctccctcagtcttggacaaacgaccttgctttaatgctttggaaaagtcaccttcgggttaagcatcatgagacgggtccgcaggtgaagtattactccatgacccaaagttctcacatcggccgcggccgtactgttagtcaaacatgacgaatatgattgtgggggtagggagggtacagactgacgatttgacaagccgagcccattgaccgcattgtgttcaatctctcactactcggatgcatcaagctgtccgtactcggagtcgagacatctccagtcgcagaagcgcggcaacgattcagccatcatgccatcaagatgccttcggcgagcatcagacgtcatgggtttaggctggccgatccgacccgtgcataagatcgccgccgacttgcccggttagtttcggtaggatcttttaacgatcaatcgaaagtcttctgccctgagcgtactccctcactactttgctaccaggacgatcgctgacgtagggactgaggagatgcattatgatgcgtctcccgcattgcggttttcccacgaccatctgacgtcgggcgaaaagaggtgcgatgcttatttgatactgacatggtatcgagtaccttttcgataagttcgaaaatgacaattaccataggcaagtatctcatggaaccagtaaacaatgtatgtttgagcatgtttctcgaattccttccccaactcgaaggcagaatgaccattcagatgatctgaccctgcgggccgaacatcgtcgacatctgtcttgcgcatcaaccccggctcgctcactcactcgaccctgacgacgaagccccttgcaaggctaggtgtggccgtgatgactgtgggcgacgcatgtctagctgggacgcgaagccgaacctttggttctcccttggacatgacgtccagccggaatcagcaggctcttctgctgaatcggaatgatcacagccagccgctgtggtgctgcgcgcgaggaaagccagagaatcgacgttctcgccatgaaaggaggatgatctgcttgtagcgccgtatcacgtctggcctgtcgcctgtgatgggtgcgagacgtccacgcggcttgtccggcattgttgtaccggctgctgtgggagatgaatacagcgcatacgacggcggctcaatcgcgacctcggtttcaggacaatgtcttacttgggggcgtgcgtagccagcgacatccacgtgtctacggcgccgagacgagtcgagagcgttgcaagctccaaagctgacacggatcggtgcaacagaccccatcagagtcgacccacaggcttgcctcgttctccttgcagtctgtcctgacgtgctggctcgcttacggaggaaaatgagctagctagctcccctcttcgcggttatcagtacggaagtgtttcgatcgattgcggtccgtctctgcgtacgtgatcatctcgatcccgaaggaaaaggcaaggacgcggggaggaagcagatttcgcgagtccgagaggctggcatagcaaaggggacgaaaaaggcgcggtttgtcaccccgtgacgcccctccaccccccctctttcggcgtgaccctctggcaccgtgacccgggcaagaaagcaaccgagaaaggatcgagacatccgaaagtttactgattagtttggtcttttgcctggcgaacgtcggttcagttggcgaaacttctcgtatatcacggctgaacgattcaagggacgaggagaacccgcgggtagaaacccaaagctgccgaaagtgaggaacgggaattgcgaagaatgacgagcgagagggattccagcaatcgagcatgggattaggtcgataccagcatcttccgagcgatcgccaatgaactaaaatatggatcttggcttgcttttcggtggatcgcccaccagtgccgagaaagggggtcggttcgggtggtcggcggtgcggaagctcgtgtacgtttccgtcctccatagacgcgtcactgcgccttgcccccctttccccccactatgcagttgaatgattgggccagtcgacgggtgagggagtcaaattcaatcgcttccctccctcggctgctgtcattttcatgacatgagatggcgcacaatactgtaccttgtttctctgatgcctttgaattgtcttcccttgccatgggtgacggatcgatgggagggaggcctgcagacgagcggcgtgtgcagcgaggtcgtttattgggcgggaccgccgagcgaggtgatgagggtttgtaaccgatacatccgcccatccgcgcgcccacggttacttcctccgattgttctctgcctggccgccatgagaacgatcatcatttcaagcgacacgacgatagactcacgatcaccatgcgagtcgccgagccgtccttcgctgtactaccactggccgcgatgttccagggtcgagatggcgcacggatcgcacggggcaggaagagcgttttcatgaccgagcaaacgttagctcgctccttttctccctctccaaagcttttccgcaggcgccgctctttgtgccctttgggttgtgcaccgatctgcacgtaagtcaccctttcattaccgctcgagccctggctgtcgactcttgatcgtagattcgatgagcatctgtgcgattaattgttggggatgttctgccaccctcaaaggcgaaatgttcatcaggcctcgtatttatttccgtcgcttctgataacgagagaaactctttgcccccttccccccctcgcccgccttggcctcgcaaagccccgtttatacctggtctcgcattcagccaacgacccgctcgaacgcgagggggaaaaaagtccgatctcgagttacaaaccgtatacatcgatacgacccgccctgccaaaggagagaacaggcttgtgccgacgcgaattatcggtcccgaaatctcttcctttccctcatcatcctcctgtcaacatcgtcatcgtccccctaacgacgagtcgacgagattcaaggaccctgaagacttacaaccacacacccgcacccacacagacacgcaccgtctagtccactactcggttcgacgtcttggtctcgcagcccgacattcctcccgatagtatcggcctaatcgacatactactgcgctcccgcttgtcgtttgtattatcacggtcacaccaaccaagcttgggggaccaacaacaacccgcaatacgtcaactcgtcaagactctgatacaacgagtgaataggacacctctggtcagatcttggatcactgcgcgctctctgacgcagctccggacactccgaactctcctgggtccacgtctctgtcgaaaaccgcgacgccgccatacacgagacacggatagcggttttctccagaaaagacgcaggccgatccggtcggaggcgtctgtcaggagttttccgcgactatcccacgccttttggtctgaaagactctgctctagagccagaccgataggtcgatcggtctcgacctagcatggaccgggctcctcacagctccgaggatcgttctcttcctgcgctatttcaagatggcaacggacgcgaagacggggacgtcaaaatgtcccaagaagctgtcgatgggtacgataccaggagaggaggatcaagccgctacgacgaggaccggacgtcgtactgggcgtctcgtcgcgacgattcgggcgacttggtatcgggagcaagtgcaggtgcaggtgcaagtggaggagggatgatctcgccagacgatacttcgatgaatttcgcgtcgcccacccactccaacgtctcgatgcgaccctactctggatcgaatccacactattcatcgtactcgacctcgacgaccaacctctcgaacaactaccctcccaacaactcttctacaacctcgcagccttacgctcgacccgaacgcgtaccgggccgcctcaaaacttttccgtcatcgacttcgacgacatcgtcatcccaacccgctccttcctccccgacctcgccctttccgaacgttgcacagtcacctgatccaagcagacggtttccaccttcatcggatcgacacgggccaatgcctcctttgacgctgatgaacccgctcaggacccagtcgacggacggttggggcaattatcaggacgcttacggatccagtgcgggtcaggttccaccacccgtggcggcatcgtctcaattcctacctcccgaccgcacatcttccccaccccctattcatcaaatccctgcatttccgagaccatccggattgttcctcccacctaacccctatccggcctcgtcctacaatcaatcgcgcaggcacggtgatccttccgctgtgttccccttggcaccccccgtggtcgaattcgccgcctccaggacggctgaaccggggccagggccgagatcggcgtcggccttgcgtagggggtcgttgaacacggtcaactcgggaatgagaaaggcagatggtcaagaaaagtactcgcgtgcacgggcagatgggatggacgatgggacggagcggccacgggaagatgctggaatcattagtctgggaccagtcggacgggaaggttggcagttgagcgtggtccagcagccggagcgggcgaggttgtgttccttcaaggaagaaaacgagacgagtacgttcaaggccgatactgcgtgctggataggcggggctgactttgtgccgcttttctatctttcaacagtcgataggagaccggtcgatccgccgcctgtagtcaagctgactagaacaggtcacactgtagagtaggtagctctgggcgaacacgatgagtcaggttttaaggaattgtcatcgttgattcactgtgtctttggttcttcatagggagatggtggtagcgtctgtgcgattacgagctatcgtcgtctcagcaacgccgaccataactcgcaagtcgttggatcaaccagaaccgcacgattacgaggaacgacgactagcacaaggagcggatgcgacgactggcgagacgacgcaaggtctggatcagcttcaagatctcgccggccacatgggcgcgttcgccgtctttgggaaactgagtgtccgagtgcccggagtgtttcgactgcggtttgaactattcgagacaatcaggtcagcatttgcgagcgacgatcggcttttcggcgggaccgtgtgggcttatacctggccatcctgtcaatagtgggcaagaacgaggactggcggcctgtgtctcggaaccgtttgaagttttttcgccgaaacaattcaaggggatgaaagagagcacggcgttgacgcgacatttcgcatcacaaggtttcaagatcaaactgagacaagatgctggggctggccgagggggacgcaagcgcaaggcagccgatggcaatagtatagtggacgggaaccggcggtcgaccgcgagaccgcgcaaattggtcgatgagggtagtggcacgatggttacgtcttcgtcacgatcaggggtcaacgatcccgacggtctggacggcgtcaggctgcaaaaaatgcgtatcgagccgttgccgtcgaggcgatcgagctctatggcgggttccgcgatgggtcgccaggatggagctgaggattacatgaacgggtatatggacggcacgaacgatgatacgaccgccatgtacgacggcgagccgtctcggtcgacgtctcgggcggatggcaaggtctctcttccgccaatcggcaaggtgctgaaacagtcttcaatctggttcaatgaatccggtttacccgttgatgcggggccaggagcagcagcagacggagacgaagacgtgcgactggtgggcggtgtagcctttgaagacggtatccgttacggcggagacgatggcgggttgccacccatgtctttcggtcgcctaccaagcatgatctcggagggaatactaccgaccacgccaggcgggtttttgggtccttccgatcctgccaactttagcctcaagggtttaagttccagatttgccgcgcctgtcaacagtcataacaacaacccaatcggtcccttcgccgatcaagtgtacgatcggatggacggggccggattgcgaccatcaggcatggccatccggtcgagcctcaacgcgtttgggtcgcatccgccgccgcccatgcatccttgggcacaggcgcacgacgatcgacaggcgttcagcagcgaagtcccgaataaggctttcaaattggcgataccgatttcaagaaaggtggaagacgatggagaaggaccgccgatgccgttccggacgatctaaggtagaggatgaatgacgtgaaggatgcatggagatatgtaattagctgagagaacatgcgagcgagaacttgtggggtatcgagatcgacatccttgtttgcgtagcgtccggatggcgcattggcctgtgtagattggcttgtccaggggcccgtctgtcttgcgattctcagacgattaaaagatctgctaaacaaagcttcgaccgtcggaaccggtgttgtttccttcaagactggcggcaagccatcgggatcagccatgtggcaaccgaaacgcgaattgggtggcgttggtcgcgccagctggaggttctcatccgtcgttacctgcaccactatgcctttactgctcttcttgccctgttcctgctcggtgtccttgacgtcagctcaagcataaaggatacttactatgattgcggttatccccagcgacggaagagtgcttggttcatggagtacgatagtcttcatcaaacgtacgagtgggcaggctaccagccaacagattttagattcaggtcaatgcatcggcccaaatttcgaacacgatcggcatcacttccgcgtaaatctccatgctattgagcgtagcgagggaagacctgatcagtctcctttaaatcgatatgcgcaccgatcgcactggcggctcaagccaggtcgggactggaagttgctagcgtgcccttggtggccgatggtgttggatgggaaatggatgaggggaccagtggttgacatttggcgtcatgtcgttcggaacgacgatacctatggaaacatgcatcgaatgcggcgttaatgaggacgattgatcttgatgtttgcagcggcatcgtcaatgttgcatccatatcatcgacgagataaaggtccagcgaaactcggactggaaacagatcacgatttcttaaaccaattgattgcttctcttttgtactgacgtgtggtttgagtaagcgagtacgggttatatctggcggtgtcgaactggacagggaccacgggtacgtggaaaccaacgattgtgatcgtgatcaaccgttcgcatgtctacatattagttcggaaacgacaggtggtgcccgaggcatccctgcccgtgcacggtttcgacatagtctcataggggctttcagcggtagaatattgaggagtagtagtttcgaacttgctgcgcttgccggtaatcagccgcaattgcagccagtcatggaggtgataagaggactcggatgaaacgttagaacccgctcacgactacggctatgaccgcggttacaatgggaacggataggtaacaatggagaatcgccgtctcaaattgcgaccgttgagaagcatcaagcgtgttgcaagaacttagaagcttggaagctggaatgcaattcaatcctttcatctattaaacgaaatatcgatggtcttgaacaacatatactcagctctcagcatcttcgcaataccgtccacgtcacaaaaaatacactaccaaccacagggtgtgcgtgctgtttgctgtgaactcaaaccgagctgtattactaagtggaaccggtgattacctaaatgaagttgtcaaaaaagaagaacctcctcgactgctggtaacgcatgtccatgcagaattatggctcaaagtcggtctctttgaagagaacaaacgcttcgagacgttgtcaagcagtatcggcctagcctttgatgtcttgagcatgtcaatcaggtggtctgaatagtgtcagctctgtaaaacatcctttctcatttgcacaacaaacaccgttttcccctttcggccgagcttggctttttctcgcttattatatggatcctactggacagcgaacatggtcacaggctctggatgatcatcatcgtcgtcgtagctcgataagcaagcgtattcttggtttcaacttcgtaccctttctttcgacaaggcggcatgaagcagcgacaagctagtttgtcaacctcgttccgaatcatccagtcatccggacggcccggcgacccaagcctcggacgatatgcacgtataattctcggatgatgaagccgggaggatactcatcgacaaggagcgcaaattatgatcatgtatctcgtgcatcccgtcatcacgagggataccccgcccgggatcattctgacaactcccatcaccaactccctactcctcagtccgaaccgcactgtccatcattatcgtaattgtcgttattgttgttattctccccgcagtacgcgtaccaaggctttttccagggcgagtaccaatttcgcctcgaccggatccccaccccgcgcggttgtcgcgctcgtggtcgcacccgggttcgagaacgaggaagatcggtcctccgaagtcgaacccagtgtgggtggatgagaatgagaagaagggaaaagatcagaggggagtgggtgtgggatgttcaggttgagaaatatctggcgggacgtccgacgggctggaaagggtcggacgaggttgtatgggcaaggtcgaatgttccaggtagaggttggtgtgtacatcgtcgtcgggggttatatcggcgagaacatttgcatggaaatagacaaacgaaagacgaggaaatgctcaaaatcagtaaatgaaccctcttccgaaccagcctgaacttggtcttgactcccgaaatcgacgtcgacatcgacgtacctaatctcccggccatattcttgcccctctctacgtccatcgacatccccggcccggcattccttccctgtccggatgtgccatgatgactattcgtatggtcgagtggagtggagaggagggtagtgctggtatttggaacgttgggctgtatcacgagacgtaacgagcaggcgtgagggtaaaagaggtggaggtcgaggcaaatcatagtttcggatggagatttcagctaggtatgggtttagtacgaagaaggtaggggacctacggagcgggaaggaaaggagcatgcccagtccgcagccagacgtttcgagcctggtcggatgtctacccttgtcgagctcgaggatgacggatccacgcgttcatccgagcgcgagtcgtcgggaccaccttcagcgtccttcaatgcatcctggtatgcgtcggtctggtcattgtcaccgtggagactagtagtgactgtcccgatgctagcgtagagcaaggacgtgctgggtcctatggtggtatgttgaacgatgaatcggtaaggcgagctctggaatgggctgggaagcgtgatgctataggcgtgcgtcgtggtcgtctgggcgggtagggacgaggtcattgtgtagagagagtctctggatcgtgaaatgttcgttggtcgtcgggtctatttcgaatcgactgcatacgaacagtcctgtagacagtagaagtactgctgagtagacagagtagtagactagatcagagcagcggggacgagtacgaatcatcaggggatcatgattacgtaatcaacaggggggaagtgtgttatcggatgtaaatgatgccaactatttgcatccggtgatcccccgcgtcgatgacctcaaagtcctcaatgcaaatgtcattgtcagggtgatatctcaatctctttcgagggagcaagggggtcatgcgtatcatccacaccacaccacaccacaccacaccacacgatcgcaccatccctgcgcacacaagctagagtggcaaagttggcaccacagtctcgggttccaccgccagtagtgcgcgcttccatcctgatcattcgaccacgaagggggttcggttcattcggttcattcggtcactcggatcgcgccattgatcgttatcgaccgtcgcttagggactgctctgagcaacctcaacgatcgtcatcttacccgttcaatcggttataatctcctcactggagaccaaacgtcacaaagcagttggcagagattgttcaaaacgctcggctgatcgtaaagacaaaacctttgatcgacgacagagggacaggggctggacttttcccaatcgccctcgcgaaaaagcaacgagagaagacggacactgcatattcatcctttcggaacaccctgcttggacatagtcccttctgacccgagacctcgccagggaagagtcgagcgattttgcccatgacgagcacgagcacgaccatcgacctaggctcggcggtcggaccgaccctgccaccggattggcagtggatctgttgcgaccaggatcacggctcgtcttccagagctccgatgaccagccctatcgtcgatcatggcccgcacgctcacgctcacattcactcgacaccggcgccaacagaggcgctgggcccgggcatgggcatggggacgggggttcctgatgcgtcttccgatgtcaaggtgggaaacgcacaacagaatcttcctttgaatacccgaccacaggacccgcaaggacaggcgcaggatcggtcaaacgcgcatggacacgggcaaggacatggacatggacatggacatgggtctgcgcacggtagacgacatcacctacgatccctcccctcacactccggctcggtctcggtctcaggctcatcgttctcgagtccactctcgctctcgaacaagcggggaaacgacgtgacaagcacatttgacgcagttccaagtgcaggagtcgactcagctaccgatacgagtataagggcgggtatgctaacgacgggattcgcgggcacgagaaaggggtctcatcggagtgcaagatcgttcgatccagggttcgggagacgaatagcgcaaaagtcgtactcgccctcacaagcccaattcacacgacatgcgcagatcgcagggacaggtacttggatgccaccggggcatgtacacacggggttcgatccgttcagcccggaattcatcaacgcgcccaggtctatgaaaggcgtgaacgaggtcccaacgggttcgagatcgacgacgtcttcccgagcgtccactcccgggttgtattcccctggatcggcgagatcgatcctcccggccgcggccgtacagttccagaatcaactgtatccaacccccgggtcgacaccgacggatacgatctcggccaagttcgacgcgcgtgaacttgtcaacgacgttcgggacgatccaatctcgggcttcacctcgaagggtatcacgaccgaggcgcagttggcccagtggatgacgtattgttgtgacaaggacgattgtgtggatccttttcccccaccatcatcgaatgggatggggatcccctcggcaatgtccgggggtccgatggatcccggtcaggccgggttcgaatacatggcagacaagccgtacaaggaacacgtcatgttccaggccatgttcccctctgaggggacgggagggccaaccccgaatacgaccccgatctcgtgcacgctcgacccgagcgcgtgcagcggagacggggactgcaacgcgccacatggggatccggcttactgctgcggaggaggtccggattgccacgaacccatcatcgatagtatcgggtgtcaaggacatccgcagcagtgtggtctgcccgagtgttgtccggccccgatcggaacgtgtgcgggtgagatgggtatggatatattcatgaagggggtcgactgggagcgtctcgacgcgattcacggatatgtgagtcgacggagggggagatcgacttgcgaccccgaatcgagtcgctaacaattcgatgatggtattgctggggatcttgcaggcacgcggcgcgcacaacatgccctcgagtgggagtcagacgccattgacactgggttcaaatacacacccaagcaatacccctcacggagctttctctacccaaacttcgccattcctcaacgcggggtcgggcgaagcgcaagagtttgatctcggaccgccggctcaggggacgatgccttccacggatcaaacgctcgaggccttcctggccgctgttgctaaaggggacttctttaccggtgaaccggtcgtatctaccctcgagcaggcctcgaccggagacgcagtgatgaatcacgtcgggtccgcttcgactggcggtcatcccgacgccttggtcaaaccggcagacacgcacgtctgtcactggcaaaattgccacgagcatttcgggaccgtgcaagaattgttatcccacgtcagctctgagcacctgaaaatcacacccagtcgaacgcaggaacggcaaccggcttatcaattcggtaccactaccagcactggtctcgagagccgatcgatctcggggtcgtcggcgggcgggatggatttgcagcttggcaatcgcgaaacggaaacttttccctcgctcatcgatcctttccgtgccaaaggcttcgaccaagcagatacgttcatggataccaccaatgcgccagtatcccagagcgacgggctcatggcttgtctctgggacgattgcataccgggacccgaattcacgggcgggtcaaagccgttcacaggcgcgttcgctcgaggcgcgacgacaggcgaatccgaaacacaggatttcgccaaagacctcgaatcgctccaactcctctcgcacgacgcaaacatgatgacgcccagttccgtcgcttcagcgtattcacaacacctgcacgctgctgtgagcgcggcgcagagccagaccgacccgcagtactcgcatcgcgcatgtcacgtacccgtcccggtgcaaaacgacaatccactagattcggcaagtgccgtactcaaacacttgctcgagcaacacctcggaacggaagccacgaatagcctgctcaacatcgctcagaaccactacacatcggtctcggccgtccactcccacgaccaaggcaagggtgttgctccaggcacatcctccaccggttcagtcgcgcagatacctccccctcgcagatctagtcgagcagacgcacggcctcaatcagctcaagcgacccctcagagacgctcctcggacgtcaaggaggaagcaactactttccagtgccgctggcacggatgtgacaaggtattcgataccaatacggccttgacggaacacatctctaatatccacgtcggaagaggaaagagtacatacgaatgtctctgggagggttgcgttcgatgtgacgacgtatgcgatagctgcgacgagggtgacaagatggagacggatgaaggcgagaagcggggacgaaagtttgccaccaggcagaaagtgctgcggcatatacagtctcatactggcaagtctgccttgctaactatcgacctcttgtccttgcctcgattaacacctgatccccttctaccaggctatcgaccgtttgtttgccacctctgcggtcaatcagtttcggaacaggccaccctgaacgcccaccttcgtcgccacgcggaagaaagtgagctcggaaaggaggggacgagaaagcaagcgaagaaggaagctgatccaaacaaacgtcagaaccatttaagtgcgacgaagaagattgtgacaaggcatttgctagcgcggcttccctagctgtacacaaggtgagccctggagtatgttgtctgaccgctgcccgatgtaatcagggcgaccgtcgcagcgcgcacacacgggcaccaaaacgcacgtctgtccgcactgcagccggtgagtctgaagagtttccacactcatgctgcgattactcgatctgaccgacgggtttcgtctccttcctgacttcagtggttttatcgagctttccaagtcagtgccatcatgccaaagtgccctcttcggatgcttatcccgtttgcctttcgcttcgagcagcctcaccaaacacattcggactcgtgagtccttccatctagtctagccgtcgctgagagactgaccgaaagctcgcttacagacactggcgacaagccattcagctgtcccctcaatgggtgcggacgggccttttgccgttctgatcagcttaagcgacacatgatgacttgccgttaccgtaaggctagcgatgacgaccgatcctcgacgacacctccttgagaagcagaggacaggcgatgtaaaggatgattcgtgatacacgcatgtgcgagtacaatattcgttctctatcaaagcccgattctaaatcattgggatgatcacgaccttgaagctcgtcctcttggtcgctccgtaaccaccctatgaaacgagaatcgtaaaaaaaaaagaaaaaaaaaagttgtagatcagccattgatccagaattgaaacgatgaagacggtcggatacgcacatcttgttcccgtccttgtccttgggtcgcctcgtcctcttaccccgggtcagccatccgtagacggatcgaggatgcttgttacccttcgactttcctcgtccacctccgtgaggatggtcacaggcgttcatggcgagacctcgaactcgaggctttcgacccatccatcgggctcgtccggcctttccgatctgttcctgctgatgctccttgctgcgaagcgccataggtttgcgtcagaacagcacattgagaattcgcagagatgtcactgcgccaaactcacttgctgaccgtccccacagttgctacgcaactagggtgcaactttcgtacctctccgctttgcaatttgaccaatgtccaacctcgatcgatgttggcccgttcgagcttgacgccggtgttgccctcttctccgtcaatatccttcttgcctactccatgcgaaacgatctgaccgaaagttccagcgcttcggcagagttgcatcttgcccgaaggcgagagagagatgttatgcacgatcgtaccagggggacacaggtacagaggcaagacgttgccaggtttcagcgtcaaggttcgaagcagaccgagtgctcgggatgacgaagttgctgagccggagccaggcggcaagacggtctgcggtgccgaagggtcggtgctggcgtttgattcgtctaatccgccgatcaactctgagggaatgcctgctcggtaagagcagacggtgtctccctctcgcaagccttcaggggccaagatgtagctgtatcctccgatcgtctttttcttctccttgggcttgccatcctccttgaactgctggggaccccaccaagccgcatcggtcgcctgaatcgatgatttggcttcgacctcttccaaagctgcagcattcttgctcttgatgagcgcgatatgggcgctcctgccgggatcgtattctatccgcacgacctcgtgttcgccagcctcggttcggttgaaatcgacaatcctgatcctctgcttgtgaccacctccgacgaaacggttgaccactcgtccagtgtcattccttcctcccttcctcctcttggcgagagtaagatctttgagcggcttgcccttgtgcaaatgaggatgctgggcagccaacgagtgtcggactccctggatgccgacgaataactttgtatcagccctaactctaatcctttaccttggcttccgatgacttacaggagtgattggcttcctctttccagcgtaggggatcatcttgacctgtgattgtaccttgggtgcagggggtccgtccatgtagagagctgaagcattattggaagagctcgaactcgtctcggcagcggtagcataacgtctagctacttgcaaccgggctgtccgggcagctgctaccagtatagatcggggtagaggaggcatgaagggcacgatgtgttacaactgagtacgtcgtcaattctatgagatcgtcgattcgcaagttgagcctgctttctgaacgtaggttagctacgaccccgatttccttgggaaagtggtttaatttgataaagtaccactttgaagcgcgaaaagtgaatcaacaatgacgtggcaaaaaaaaacaagtaatagttgatgggtaatggctttcagaacagaagacgcgaactattgaggatacagtctaccaaacgcttctactgcagaggcagagcaatgtccagctcgctcaggccgacaacgccacccaattgactccatctctgagcacgagcgttccttcgagcgatacattcctcgatcaccgcgcgccagtgaagattgccgtcccaagtcatctacgcgagcgacggaagtgcacgtcagtatgggccgggctaagtcgcgtaccgatcatcgcaaagcgactaacatcggaggctcccccgaaagcctttggaaccatctgaggctgggccaccttgccgtcggataatttcgcatcgaaagatacctgtaacggacacgagaattagcttgtcatcccatgtacacgtacatcggcgtggaaagtcacctttgccttagtgttcgggctgatcgtgagaaggcgccagatcgagcgagttcagcgtttgtgagatggagaatggtaagagttgaaagcctagacactcactctacgaacggccacatgacgttgaccaacaacttgctcatcatgccgaggttctgtacgcaagcgaaacccaacctctccggataataacgctggaggtcgtgcaagatgtgtttgtaggaatcgatggcagcccaagatcgatcgactttaccaccgaggtcgaggatgaacccgatctcccttcgatgcgaggtgcgatggaatgattttagctctctcggggttggtcctcgtcatgcttcttgcacaaaactcactcgacgccgccgaccatcaagtccatcgctcgttccgtcatgaagaacatgctcctaaccgttttgaagctctggggcgggtcgctcttcttggtgtctgcatcccagtagaccataggctgaccctggttggcgtaaccgcacgtgaagaatttgcctagaacgccctgtatgatgtcgaataatgcaaattccgatgagatgaccgagctgggaatgatgctatgggcggtggggtggactaacgaggtcttgcaattcctggcccatgcccgcgacatcatcgattcccatctctttcctccatcgcacggcttcctctagtcggggaatcgtcttggtgatgttgaagtcgtcggctgtgagaaagaacgaggtcagcgatcagacagtttcctggctttaggacggctgctaggcggtggctgatctgacataccaacgagaaacctttcgagatcaaggagtaggataacaatcagccttcgggatcgtacccaagagacatgtcacttcccatagattcttacctgatgatacactccttggtctatatgttgacaacagtcaagttgatgatcaaaagaattgattgatgatcagcaacgttgtattacaaatccctttaacgattcggcagttcgatcttaccaaaaacatcttgtcatcggcactcaatggcccgacctgcatacttgatttgctggctgctgctctgtgcttttcgttcatgggtgcttccccagctcgggtagggatccattccaattggtatgccggatcagagaagtgagcgaggacggcttcgtaagccttggccttttcaggcgagttgactcggtccgctttaggtcgaacggtcaccgatccaggcgaaggaggtgcaaagagctcggtcatgatgatgaataaaggtagatcgtcggaccgctgtcgatgtttgcctgagttggtggaaagtaattgatgacgtttcctaaactcaaaattgggtcttggcagctcgttcgatcgatatgcaatgaagtgcgatttgcgggtatatgaaagtcagagactgctttgatacaggtgttcaaccttggcccttcctccgactcgagctcgaagtgaacgagatgatgatgattgtttgtattcctttggggaatcctccttgctgaccccgggaggatggaaggatggatgggtgggggcgacgaaggtggagtcagcgagcgagtgatcgagtgaacgggtaccggaagcgacttcggcgatcgatcccaaacttcggtagcttttctttttacgtcacaacgaccggaatgaaacccccgccgtggacctcccacaacgatttcgcatcgcttcaaaacaatctggtcgtcgaaaattcttgtctattattatagctacactggctctactaacatatctcgctgcgcaacctcgatcccgatcggcctctagggttcctcgatctcgaccgattctgcaacgcctcgtcataagtaggcggcgactctccctgctccgactcttgcccgctcatcaggcgatcaaagacgatgttgcgctcgagcaacgtatcaggcgcttcgagcaccgtcgtctcgctgccatgggcagagccgctcccgaccgactcggaagttcgagctcgggccgtggagacggatcgtccggctcggcgtgtggcagggttaggggaatggccggcacgcgtgatcgtcgtcgtgagatggctcgactgcggaacgaggtcgatcgggacctcgttcaaaccgttttgaggtcggtggacgcggcaggtggactgtagaggtgcagcggtcgcgatggtatttgggctgaaatggctcgtcgggttgtacgacggcagtgaactgttctgtgtcgtggctcggcagtcgagcagatgcaatggtgtttctataatgatgtcgaactacgagattttggttgtcagcatatatcaaacgagtttgcactggatatcctctcacctgtttccgtttccccttcgaatccagcgcatcgtcatccccccgctgcacccgtatgacgatctttaaccaatgtgcgatcgtcatgttcgtcgtctcgtgcttggtcgagaacttgatccgggaaggacagtccggcacttgaagcatcgtctccaaataccacggtccgaatgggttcagtagctgtgagatggcgtcgtcttccgtctcgtccctctccctcgcttggaccgccatagcagctaggggtgacatccacacggcatctgatgattcagagatgatcggcagtagaggcggagcgccgccatgcttctgatcggcgttcttgaacgagaccaagggatactttttgggcgcttcgtgtcgcgctacccgtcgttgcatcgcaaaataatcgatcttttctacaatcgtggcagagccgagtaagcgaccagagcgcaatgcactatatgatagcacagagggacttaccttcgatggtagccgatatccgaaagatcttacatttggacattggcatgatacggatactgatcggactgacgattggaaccagaaagattgtcaacccgagcaagacgctaccagaagcgcattcactcacatttgacccccaatggtaaacgccttgccgctcaaggcgatcaagtatcgcatctggtcctcccactgccgctcgaccagaatattctcggtctcctccatgtcgtcttcttgcggtgttgcgaccatgctgacttcgatttcttccatgtagttcggggatagggcgcctggacgatggaccacagcagtcaggcggtatgagaccgaaccgaaatcggcatgaatcgtcggtggggcgttgggtgggataggaaacgagatcgggtaattgtacacgcctgatacgcatgcggacatcagtgtcgtgtcagaacgcagcagtttctcgtggcgtcactgcttacctttcttgaactctttccagctatgcgagcctccatctgcggtttccgcgtcgtcattgcctagcccgaggactttcatcccgatacccctgccacggcctcgactatcgctccggtcgctcgattgtacaggactcaatgctctggtccgcgagggagacctaccagcaccgcctcgaccaaatggtcggatctcgcgatcttctaccgccagcatttgcatacgtccatccatcggagcggacatggtggagctcgatctgcccgtgtggtcgacaaagtgcgaactaggggccgagggaggtggttgacttggctgtctcgttctcgacgtcgacgtcgctctgctgagactcctcagcgcattggcgatcgaaaatttgctcccctttcttccccgctcgggttggccgttcggagcggtaccgttctgctgtgacatgccgtattggtgtaccgcatacgtcgaatccgctggcgagcccgtcccgctcggagttctctggctcaacgagctctgtgacgggcgatgcctcaagctggcaagatgcccggccagaaccgagctatcccgccgttccctcccatttatcgcgacattcccgtttgttacattgctgtctaccatattggctggtgtcaactctaccagacttgagcgatttgatcctgatcgagtgacctcgaccagcggctgtgattgaggaatggtttgagaagaggcctgaatgctggtccggctattgttcgtgcttgggtgcgcggaaaatatcgccgcgtgcagtggatgaggagacgcggtgccatcaacgtgtccgataggtgacattgctctcaagtgactcctatgagacaaggaagacctcggactcgatgaagcatcggcaccgttcactcctgatccaatcggccgatgatccgatccagactcttcgctgtccgaaggccctgagccgccgtttgtcccattgaatctgacacccaaactactgtgggagacccgtggggaccgacgagtccggttcgcctcctctgccggacttggaaatcgcgagccttccacgctggcgattgggcttagagccgattccgcgatatccctttcatcgctgtcgctgctatggtgtccggatggcatcctccgacgtggagaggtctttcttcccctggcgagactgccgttgtctggtcgcaacgggtctcgtaatgcgtatgcgggggaaggtcctcttgcctgtgagaaacgttcagagacgcctctcggaggagggcaggagctggcggaacttgtcgggccggcctcctctaccgggctaggcgactctcgatgataagccgaggtgatgtccccgctttgcattcttgagaaagctggcccgttcgctcctggcatcggtaccaagctagtcgaccttggccccgcccggttcatgtttctgcccctcactcggtcatcgtcacgcatctctcgcataccgtctgcacgttcctccaggaagtcgtcttcgtcattttcctcttcgacgtcccaggaatcgtcgccgcggacacctggcccgatagacaacgcccgacgatgaagattggcgagttgagcatcggccgttgcgttgaagaatgtcaaggtctcggagatgatcaagttttcctcacttgtctctgtccttcttgggccgataccttttgtcgcacgtggattgtgagaatggaagggatgcataatgtttgcgagagcgacataccttccggccattccgtgcgactcttgccttcaagcttgacctcgatccgcttgatcctcgttggcttggtcaacctcaaagttagaattcctctcaagatcgcaggtggcgcatcttcttgaacccattgacgccgtcctcgaaagtcttcgcctgtggccgagcctaccgagcacaaaacagctggtaagaaatctcgaattattggggacaccgtgacgcttcccggtctgatcttacttttgaggtacgttatcggctcggtcaacctgatggccaaaggtgtggaagtgggctgcgaccgcagcatgtcgacgtcgtttcgagtggcttatgtctgcatattgcacttgattcggtaataccttcaagtcgtcctccccaaacgttgaatctgatcctcaagtaagcttgagatagggttgccccgaccgagttgttatcttttcgcttagaaggctattcgggcggtgatcctccttcaagtacgccgataatcggctgagatcctgattcaagaagagtatgccaagactataccagcacgcagtagctaaatcccactttgactcgaggaatttagacgaggttgatgtgagtacaagagatgatcggttctttggccggaatgatagggcgagggcggcgatgagtggttcggcgaggtcgagcttgattcacgggcgacagtctccggaatcaaattccccggccgataagggagagatcgagacggaagctaatcaaagggtgggtggtgagatctagctggcacagtcggcagagagcgcaaaactacccgtaacggaggaagggtatatattatagatagatgtaatacatacaaccagctcggtatgcgttacaagacgatactcgcatgacatatatgttttttccgaccaggtcagcaccccgtgtcaacttcgctctcgtccgtctagcacggcggaggaatatttatagcatgtgacgacgcttctcatcagccgttcacatggtctgttccattcccgcgagtggttcgtcgatgacttcggctcgttccgtccaggtttgtcaaactcagaaacgtttgttgctgtcaagagcttctcttacgctgttgtctgcgcgtgtcaagttgacaaagccccagttgtggggacagttctaatctcctcgatgccgcccatgccaacactagctaaagcgttaactgtcgtatcgatatcctcgcccccggccggcatcgcgggactcgagtagtacaccctgtccgccacgtcctgtaccagccaatccagaccgtcgacgagcttgtcccctgtgtacgccgaacaaggctggacgagccatcgatgtgattggatcgaaggtagatccagctcctgcttcagcagcagccgggacggtcacacggtcgtagattgagcgttttagccagaggtcaatggcgtaaatcccgcaagtaaaaaacggggtcgactcacgtctcgtatttctgtcagggtcatcgaaccgggaatatcctgcttatttgcaaagatcaagagggtcgcacctgccaacctctaaagatgctcgagggaaccctccgagagatcagctctcgatccattccttttccagtacaggatgccgccgcacctcttcttgcaacaaccccttgagctcgtcttgacagtcctttgtccgcattcgatccgaagagtctaccacccagaccacagcgtcggtcgcctcaaaatagttcctccagtacggccgcagagtccgctgcccgccaacgtcccagacgttgagggtgtatctgagtcaaacacagccagtccatgtcagctcaagactttcgcaccggaagatgcaaatttttcacagggtactgaccccttgtatccaaaggatttgatgttgaaacccagtgtcggactgacagtgctgatatcctcaccgttcagtttcttcaagatggtcgtcttgccggcattgtccagaccactgaatcaagctcacgccgcggtcagcattgcgcaattacgagtcgtgttagagtgattctgcctacaggaagaggattctcatctccttctccttcagccggttcttccggatgatggtcaagagtcctgcaatggtcgatgctcagtaagcttggaggaacgcttgtcgtctcgtaacgatcggcgatcctaacccatgctgtctacggcaatgcaaggggtctgctatctaatagtaattttgataagatgatgactggccgatgagacattgcggtggttggaatcccgtatggcgcatgaatgctcgctatgaaggcatacgatgcacgatgcaacctgctcgcgactcgctgctagctggtcgagagctacctcagcacaagaatcgattgttgactttgtgcgtttcggatgcaaaaaaatccctaaacatgacaggattgtggcggatcagcgcttagatcaggagaggagaccgcagcaactactgcacaagtcctcggatcactgtagtggtggctataacatggtctaccggtctcggacccacagacacgtaatcatgtggacgtggtcagctcgaacgacatggcaggaggtgtctatcagatcacgattagattcttctgcgtccctttcgaattgtcggagcggctcgtcttgctccacctggctcagatcgcttctctcggatgtaggccagatatttgattatagtagaccactactcgagtacaaataccttgtgtatgctttctctccctctgaccctagaacacgttacctttgacgcagtcgcggagcacggcgttgcgattgaacgaactaggttgttggatgctctcacgatcatcctgcttggaaccgtcgcaaggtccccaaatactaccgggcgcgccctaattgatatcagctgggtaggagattttctttgccttacctttcctcagatcggaaaggacgatttgcatccccttgatgaaatcacatgactgggtcaagagtaccgttcccgttatgacgaattgcacctatatcttcaatccggtcggtacttccagaaagtccctgcgcttcctcgaagctgatatgagatgggcgagatcttcttcctctacctgttcaatctgacaccgttgagacccgttgaatggcttgtcggcctatgtgcaaaatttgacgatgaagacgtctacaaactcacttatgacttggatctcgttcaagattcggaagataggcaagatgatccgggtaccagaaaacggcaacagcctatacagaagagtctgacacggctcggcgaagaccggacggagttttcacttcaagatggcggcgagtctatgcggtctgctctttggacagacaatctgtccgagatgcaggcgcaagcacaaacagtcggctgctgtatcagagcctctggcaggttctcaatggactcaagatcgaggccaacaggtgcatcatatcagagtctctgtcgttagcggaatcaagatttaggtctgtttttgttctatttcaactggcggactgagacaggcaagatgatctggatgcaagaacggcagcttatgatcaggctggagaagcggaggcagcatggcaacgactggagggcgtgcctgcgtcacgatggcagggattctatgcggtctgctcgtccgacagatcgactgcctgagacgcgaataatcacctatcatgacagactccatggcaagtcgtttatggactgagattgaagccgataggggaaccgagacatgggccatcagcggagtagacccggcttgcacgacgaccgcctcgggaatgaagccatcagtcgatgcaaacaacctggtctgcgtttcagaagatggggaacgttacattcatgcggattgcaatatcaacacgattccggccgctgcgaacatagcggaaaacgcctaccctctaccaacaatcaatccccttggggacgcctcctggcaacccggcctttcgacagtgtaaacgcaatcaagggtggtctgaccagtgtcgtcacgtcgatcactctcagaaacaagacatgaactgatcatggggttgccgtatgagcgcctcgtgccagaggaagcgcttcacgggagcggtaagaagttttgaagctggcgttcgggctcttgcggaaccgcttgattccggcagccgtggcctggtgcgtttatctgcggtagtggaatcccaagggtttaggtccagcgcagcatctcgctcatcgacttattgtgttgattgcgacccgaccaggagggagatccgtcgcgccgcttactatggaccgtcgtatctctctgcagtcccgaaacaccaaaagcgtttaagagacgcccttccgggtccgctttgcgaagatcggcttttcacgcgagcaagatagggatggtgtgccttccgaatccatgtccctacgctcataacggcctgatcgtcatcggaccgctgtccagcacctcttccgtcctgttcatcgggaaacagagaaaacctcttctttttgagaagcgcgcgtatcatctattgaagggcatccgaatcgacattcagcaatacgacgatccagcacaagtcagctgtatgttcgaggtgttccaaggctcagctgaagagcaggctcgaccagaccctgtcttgtcaagagtgccttgtagtcttattcaaagcgctatatatccggccggactttgctgacccgagccacagacccaatagcggcagacaagaccgagatctcgccctgcagtcttcaaacccgtctgcagcaagctggtctcatgtcgtgagaatgatatcacgttcgtcgttgtcatcgatatcaatgacgagccgttcgtccagaaggggtggtacccatgaccccttgtgatgggtatactagtcccgcatgcccgacacaccagcccagtcgatctgccatatcaggatcaggagaccaaagctcccgacgagcgcctggaaatcttggacgtttcaaagtctgctcgctataagcttttgacaacatcgcaagccggcgcctcgtcgatcatcatcgatacgagaccgggagacgagtcctgaaacatcaccaggcaacggtctagcagacactcttcttacacaccactgccagcaccgccggagcgtcagagcatcccagggcgggctgagcatcccgagggtgttttcaatcgatttcaagtgaattggcatcaatctctctttcatccatcgttacaaaacaacggatcgtctccctctccagcacggaccggtcacggggaaccggagaggcaagcacgatcccgataaacatgactgatcatacgggagtcgcatgacgacaggatgagaagagaggtcgatgaaaagaggggttccgggagaggagagagtaggaagagagacgggtagggagaaatcacacacgcataaaagagacgtcgagttgggcggcaaggggattttttttttcgggattgtattcctctcgttggaccgtctagtaagggggttgtggtgcgtggttcttctactcgtcgtcctcctcctcggcatcgccctcaccgtcaccaccagcggcggcagcggccctcttcctcttgacacgaccgggtcgtccaccggcaaggggagagttcaaagcgtagtcgaggtgctacaaaggaacagaagtcggggagggggggtcagtcaaacgagatccgggtcgaacttcatcggctctggacgaggcgacgagggagatcgagactcaccttctgcgagtccaatcggacgacgaaagaaggaacgttgaccatctgctttccgacacggatgtgcctctgcctgataaggacacgggcgtggtggacggacttggcgagactggacggacacggagacacggcattgcacagaaacgtcagtccaacgcccgaggaccatcatcccgctcgatatcgtcgccgacattgacgactcacccgctcttgaagacctgggtctgcaacctcctctccaaaaagtcctcgaccttgagggccaagacgtaatccaacctcatcctcgagtcgtcgagcactccgatcctcacgagtcgtcggatcaaggcgttaccctcgaagagacgcttggggtccttgtcgtcgagtttcaagagctctcgggcggctcgtcggatcttggagagggtcaactgaatcctccagatctcacgcttgttacggagaccgtactctccggcgagctgcaatggcagggagtgaagaattaaagatgggtcagcctgggatgatctcgtggtcaaagatgggagggaagatgcgggaggagcgatacggggggatgcgagggtgcacgaaaggtaggtttccccaggacgatggtgggacgacttttccgagttggcgagggaacagtacagtaccaccggggtcggagctgattggtcaagccgaatctctttacgagcctcgacctgtgtcccaaccgaccccgaccccgtgaagtgatgtgatgtggtcccaaccccccaacccgagccgaaaaccctctcgtctccaccttcgtccctcccctgcggccctgcatctctccccgtatcgtatcgtttcgccctgactcttctcccccgcccggtatccgatcgtatcacccaccttgagctcggcatcgagacgagcggactcgtaaggacgacggggaaccttgtaggtcttggagtgggccctgggagcgctgtgttgggggcggccgggaaacgagtagagaagcaggaacagaaacaaagagagaaaaagaggagaggtcgtcagtttcgaattcgtctcctcgatccccgcaggaccagctgaagggtcgggtgtgtgtgtactaacagaggcatctgggagtcgtcgagaggtgggtttcaatcaagtgagagacgagatgagggaggaaaagatgacggtcgagtaatggatcagtatctccctcgccgtacgaaaatggtctagctctggaggaggaggaggggagtgctcacttttgtcgatgggtgtcggtctttccgggaaaagagctagcgagagtctcggtggtcaggtcgttcgatgtgaatgtcgagatgattgtttcgatatcgagatcaggcagagagacctgggtggtggtggtgaggaaggcgtgagacggcgaggggggaagcctggggcggttggacgctgtggtggtggtggtggtggatgggagtggctcactcggtcgagggttggtcgaggtggttgccgggtcaggtcagagtcgactcgactcgacgtctctctctctctctcgcgcgcgtcacccagcccagccccagccaaagttgctagcttgcagtcaaacgcagccaggcgggcaacggcaagtgaagcgccgcgactcgatcggtgtgattagaagcgcagactggcaggcgggtcgcgcttagcagaccatgaacgcgcttccatgtatcgccgaatagatctctcgcgcgcgtacgggttcaatctctttgttaccagctttgacccgccgcacactagctactggtctgcttctctctctctctctgtgtcctcgacctccacctcgttcgttcccagctagccagcccagtccaggtcactctcgctctcactctctacctcgccctgtacccacccacccacctcgcccagtcagacccagtcgtcgtcgtcgtcccaagcctcctcctcagcaaccagccaacgctccctcgcccaaccttcgcaagtcgtcgcaaccaccttcgacccgaacaaacccatccttgatttcatacccccttggaccactcacaaatccgtatacgatcttccgttctcgttctaggccaccgacaaccacctttctcttttcgtcaacttgtgagcgtcatcctcctccatccccccctcctttagaatatactcgtggataggttcgagggacaggatcagatcaggtcgacaacgaggatgggccagtggcgagtaatgagggccgagtggcgagtgacgaatgacgagcgtgcgtgcgtgtgggtgtgggtgtgatcgtaaatgtgcgtgtgtgtgcggaggatcaagattaggactacgacccgggatatcgggacctacacctagacggatcgtcaaaccggggaaagatggacagtcgactactcttccgcccgggatcgaaagttcctgcggggtggacatggatggtatggcatgggctacttttgagggatgaggaggatggcttcaaggtgttgtctacaggagggttgaaagggagtcccacaaccacgaccacgaccacgaccacgaccagggggggaagaggattcgggatgggcaaagaccgacctcgacccgattctacttggaatcgaatggggaccgtcaaccgtggcccggctgtttcgacctcgggatcggatcggaatcaggcgttcacgcatgatctgggaaccgatactcgaactcgaccgacctgcatatacatcgctttccgctccgccccgccccgccctgaaataagaacatcggatggacgaccacgaccttgacgtacgaacccgacatacatggacggacctggtgggacggttcacccgactttttttctgcttgatcgtcgacgatcggtcaccatccgtccgtcccgggagggaaaccagcacgtccagctttggtgcgatacaaagcgagatgtaccaaggggtgtcgatatgcctggacgcaacatgggaacgcacatgggctgcacacacgcatacgcacacacacacacacacgcacatataccacatacgcacgcacgctcgcacgcattcgtcgagaggagacatcgagatcgtagacggtcaccctgtcgtcccagctcgcccatctctcatctctccacactcgacctcgatcgacctgtctgacctcgaactcgatctatgcacccgtccccccttcctcgatctgacgagcgacggatataagaaactgacaatctctcaaccttttgcctcgcgacgacagaaaaaaaggaacgaataacctttcaaaatgcctcactcttttggtatcagggcgcgtacgcgtcacatgttcaagaagggattcaagggtcagtgcacggccgggtcggatgtgggcgtgtcctcgtgggattgaccgagctgacgccgacctctcgtgatcccgcgacacacagaacatggtgcccccaagatggccacctacttgtcgacttaccgaatcggtgacattgtcgacatcaaggccaacgccgccgaacagaagggtatggtaagtacacgagagcacggttttcagagccttttgcaccgcgagtgtccccgtcctgaccacgtccgccatttcatcctcgacaacccacagccccacaagttctaccacggcaagaccggtatcgtctacaacgtctccccccgaggagtcggtgtcatctgctacaaggtcgtcaacggtcgatacatggagaagcgtgtcaacttgagggtcgagcacgtcaagcactccaagtgcaggcaggagttcttggaccgtgtcgtcagcaacgccaccaagaagagggaggccaaggccaagggaggtgagtcgcgcagagtcccgcagcgctctcgcacaggagacacgcccgaacacggacgctgatcgtgcgccaccctccccccgaccttgcagagtttgtccagctcaagcgtctcccggctcagccccgagaggcccacaccgtctccgtctctgacaacgctccccagaccctctaccccctcccttacgagaccaccatctaagcgcaagcgcgcgcattcgcgagcatgtgtgtgtgcatgttggagtgggaggaacgtttgggcaagacgtgtattcgagagtctcatgtcctctgtttgatctatccgagcgagatgagaatacatgccgtcgagccagttgaaaggggtcatggccctcccagctcgatgaaacggagtttgtgtggtcgaattaatgccttctcggccaaggtttcgatggtgtgatgatcaacggcttggtgggtacccgtatatcacatatccgggctcggaggagccgtggaaagggctcgtctgggcgaacatcacatctcggtcaggtgcgctgtgcggaccgtgacgtgactgtcaaaccagtcctccccgcttgttcgatgcacttcattagggcacagcttggatcgttattcccggagtcatcccatttcgaactgcacagagggggcggcccgcccaagcttcatgcagatcttgacaacgtccatgagagcaatcacccgtcttccgaggcagacttgcattcgtcccggtattgaacatgctagagttacttgccgcgaagcaccttcgtctcgttcctcctgcttgatcctttgttcccgttactcgttggggtgaaaagcccctcgatcgtcttgaagagcctcctctgggtagtctgatcggtccattggaggaaacaacgtaactccgaaccagatagaagtgacattgagggatccctacggtcctgcttttacgggtacaatcgtccgatctacttcctgcactccagctcaagggcgtggcagcatctggcgtacgataaatcatggctatctagttcatgacgaacctgctagtaacaagaggaaacgcttgctggattgggcagggagacccctagcaagccgatgcgtttcagcatgataatcacagccaagcgcgcgagtgattctgtaccgttccaccgtttcggcttcacgtcatgcgcttatgctgatcaacattttcggccagttccatcgcatccttgttctaaaaactgagataaaagagacagggccagagtagacaagagagggcagtcccgagctgcaatatgatcgattctcgcgcgacatgttgctatcaaaggagagcgttgtctggggttgcttccatcgcgacctggtaaactccatgtggctggaaggagcgcgatatggcgtgttcgatccacagactgaaggcagaggacgcactgaggcacgaaggctcaatgttcgcagtaggaaacttcgaccgattgcaaggtgggcgacgtcagcccgatcagagaggatgcagaaggtggaacggctaccgcttcaggctggagcgaaggaagcgcaggagagggagacgtcaagtcgataacagcttgggcaggggaagctgggtcggtagaccttggaggcaatgccctggacgagagtctgagcctgttcagaatggcggaggagtcaggtggagcagtccttctataagatatagcctgccgtggagaaaaaggcgcaacaccacctctctcctcttccttctctcaattgctctgcctctctctcggcctctctgttcatcgtttgacggtcaccggttgtggttatcgaaacaatgaatagaggcacacacccatcggtacaatcaacgtggttctgcctagccaagcgggctcagcagcaccagataacagtcaatatcgtcgtaacaggcgggttgcaaagatccctgatactgatcctgcaatactgatcaggctcaggccagcttcggagcggatcccccactctgtattgatcgtcggtgatcaggtccttggggtgaaagaatccggcgctggtccgcacgggatctagacgacgtttgttccgcttcgaggcaatgtctgatcgccttggcctattcctcttgagatgagattgtgtatacaagcgtccccgatcgtgcaagacccgcctgtagtggtttcaaagaccacctatagtgatatcaaagctgtctccttgtctgtccgcaagtccaatgtatgcccattcacatgtcgggatgacgatctcgtctggctcttcttcgctcagaacgtattccgaatgctgtacgatcttagcttgctggcggcgcattccccgcttcacaagcaaaacgagggtcgtgcttttgattgcagctccgactgaggcactgtattttctacatcatgacgccggacctcaggccggttactgacacccacctgacctgcaaggatactcgatccccgtactcgatcgtcgcccatctagcgacgatgtcaccggtaattcgacgaccaggggcgcttcaaaatgctaacgatcgatggcaatttcatctatacacatacaaacgaggtaaagacgaaaatcgtgcagcgtgccccggagacgaggtcaagagggaaggtatacgtagaggaagaacatgacggtgggcacaagctgagaatgttcgagctgatggcttgctgttggtcgtgattgagttttggaagggaagcgggcggcccatggggcttgtcgatgatggtctccttgaatgtgtccgtgtgtgttcgggccggcttccgctgatatatatgaatatgtcgggatggaaggatatgtatggtggtcgaatttaccattgagagctgtccgagacgagatcaacgatccaggctggattgtcccagaggattgaaaggctgacgcctcgttcaaccgtccgtccacatgatcgacatcccgctcgtcccccgtgcgttgacgactaccgaccctgaccgttcgactcggtggcaaccccagcgatctcccgtctgaggatctcgagctcctctttggccctcacgtccgtctcctcggcacgcaagagctcggcctcgcgggccttgcgcacgtccttgtgctgtacccagtgccaccctgcgagttcacgcaaggtatgcccgggaggagggcgggagcgaggattgttctcgtgcaagtggtaggccaatccgcctgcagggatggatcaaaaagatatggttgtgagcctttttccatagaactctgcagggctgggcgggagacataccggtaaacagaccgagcatcttgtcagagtaacgtccgagcaggtaggtactgggcattttgtggatggacggaacgaaagcgagtgtggtgtatagaatggagtgatgacgtcttgtgtttatagcgttggtgtgtcgagcttgtagatcgagatcaattgaataacgacgatgatatggtggttgagtgcatgtatgtgtgttgttatctgtttcccccggtcgatctgatcaaaagtggaggtcgagtgagtgatacgctcgctatggcgtgctacaggatcatataacgatgtacatcttgtgcgatatgacgactacgcacatccagctttatacacaattcctcagacaagaccacgcctaactcgcagctcgaggaaactgctctgagctgtcgttgtcgggcccatcatggctctcctcttgccgccctctgcgtcggggagcggctcgctcttgcccgggacaggctcgagcaaccccttggcggacctcttgagatcgcccgacgacctgctcaaactgtacactcatcgaaaaaagttgctcaaggaaaaggcccagattgatgctcgtctgaacgagtgtgtcaagacccagttggaggagacgagggacgggttgagacggctggtcgaggccaggaacagcgtggggaggctgagggaagagatgatcgggatagaacagttgaaggatgtcgagtcgtcacgaaaagaaggcttcgaggtatttgcaaagatcagcaaggtcagcacttgactatccagctctcaacctcgccctcggtcacgctgacgatcgctctcgcaggtggccaacatccatcgcaacctcaatcagacggctcaaatcgtcaagaacctgcaatccatgtctgaacgcgtggccaacctagactcgcttttgacttcggatcaatcacatcctctcggtccgtgtggaccttctcccaacctgctggccatacattatcaacttcaacaactcgaagctttccggaacgagacgctgcaccaagccaagacgtcggcggccaagggggaacaggggcaggaagatcggaggacgttggtcaggtggttcgagaggcttgatgatctgggcaacaggttcgaagagtggttgtgggccatcgcgagcaacatcttggagaccgtcagggaggggaacgggggtaccatcgtgaggctcctcaagatcatcgaggtcgagggcaaggaggatcaaaaggtaggtcttacgtcgatgtcgatggcagacacgatgtgcagggcaaagctaacgatactttacccgaccacgcggacgaccaggccgtcgccttgcgccttatccgcaaggttgccaacgccgactcggccatgcgtacccgttccatgcaggccaacgcccggctgatcaagaactaccgacacaagctcatggacaagatcaccgagtccgtgcgcaaatctttcaacgacgccgagatccaggcgaccgacggggtagggttcttagaggacctgacgtggatgttcaaggatctcgatcggatcgagacggacgtgagaccgctcttcccggacgactataacatatgggaatactacgtcaaggcgtaccatacccgtttgaacgaggcgttgcacgggatcgtcaagtcgaacccggaagcgagggtcttgttgaagatgcacgcctggatcaaggaatatcgcggggtgatgaaggaattcgaggtcccgggagcgtggttgcagccggcgctcttggatggtaaatcgcaagatctgatcgaggattacgtctcgctcatcgtggacaagtttgacaagtggacgatcaacctgatgcggaccgagaaccgggatttcacttcgagggacgctccgcccgagacggaccctgacgggacgtacgtcttgcaattcgcaatgaccatgttccagatggccaaccagcaggtcgacctggccgcggactcgggtcagggagccgtgctcgcccgggtcgtcgccgagtctaccaaggtcatgacgagctgtcaaacccagtggctcaagatcctggacagggagtttcagaaacaagtccatcagcccgagaccaccccgcccggtctggtcgagtacgtcgtcgcgctggccaacgatcagttgaaggcggccgattacgccgagggcatgtcggcgaggttggaaccgctcgtctcggacaagtaccgtacggtgatttccgagcgcctcaacgcggcgatcgacgggtacctcgacgtggccaaaaagtgcatccagacgttgatcagtctaattttcaacgatttgagaccggtgaccaaggcgctgtttgtgccgacgacgtggtacgcggaacccttgatggaacagatggtcgagacgatgaaggattacacgcaggattatcggggacatttgaacccggccatctttgacattctgatcgaagacatgctcgtccaattcctctcgacctacctgaacgccctgcgtaaagtccccacgcgcggtctcaagatgcccttggccgtcgaccggataaagtccgaggtcgcacgcgtctatacgttcttttcggagtacaagaaaccggacgaagtaggcgtcgagttcgaggtcgtcgatcaggtgatttctatgctcgaagcgagcccgcagatggtgtttatggactattggacgtttgccaaaaaacacgggcccaacttgccctttatcgaggccgtcctcagggggagggacgattgggacaaggtcacggcgaacgaggtcgtcgacatgttgaagcgcaagacgagggaggaagggatcggggaaccagaggaaccgacgatcatggtccgggtagagaacccgaacgagagcttgttgaccaacttgacgaacaaggcggcggcttatgcggctccgttggccgcgagcgcgtttgccgtccggggataaagaagaagtgtcggagggggtcggatcgggtgtattgtagttgtgtgggaagggaggggcgggggttatgggatcgattcgtcggtcgccatgaggattgtaccgatcacaatcacctttatcaactttatcatgtacctgtatacagatggaattacatgtaacgaagtacgaacacgatcaagacgcaagacgtttgggtgctgttggtgacggtcagttggaggtggcgtttcggggtgttgctgattcatgggttgcgtgctggttcatgttacgagttgacgaaaacgggccgaggtcggccagtggtggcacgggaggaggagagtcccccctcggtaccccaaacattacccttcatgcccccagcgacgacgatgatggccgcccccgtggtgcctatcaagaagaaagagaagcccaaggaaaagatccctatccccggtacgacgtggaccaaggtgatcaccacgctcgacaacgtattttacacggaaaaggcgagcaaacgttcttcctggacgatccctgacgagatcaaggacgaggtcgaggcgtacgaagaaggactacgggcggacaagttgaagagggaacaagaggaacgggcgaggagggaggaacagaggttggccgacctgagggaaagggagaggatcaggttggagctggaagaagagaggaagaacaaggtcgacctggaaaagaggaagaagaaggaggccgacaaggagagggagaggaaacgaaaggaacgggatggagaggatgatctcgtcatcgagggggacgagcgacaagatgacgaccaagacggaccgagagcttccaagatggccagactggatgaccaggccgaggacgacgaggccgccgaagatgctgacgatgacgacggcgaacaagggctcgacccagcgacccactcggacgaagaggaagccgctatgggtcccgtagacgaggacgacgaagaagcctggcaacgagccgtcgccgccgaaatcgctcgagagaccaagatcaaggataaacagaaaaaggagcaaaaggcggctaaaaaggctcaagaggccgaggccaagaacaagctatttcaggcgcccgtgcaggtcgagttgaacccggaagagggcaaggcgttgttcatggcaagtcgcggggtatactcgctggtgtcgatacaatgagctctcggctgatgacgtctcgaaatacccgtcgtgcacagtccctgttgtacgaaaaggacatttctccctttgcaccctgggaaatctcgctccccctgttcatcaacgacccacgatacgtcctcttgccctcggaaaagctacgtcaagaggtgtacgaggactattgtcgggaagtcgcccggaatcgtcgactaggcaagaccaagcccgtcgggtccggttctgggtcgagtagtgctcagcagaccgccaatgctagcggtcccggaggaggggccacctcgacgacgagcgggaaaaaggatcccgagcgggaatacaagtcgctcttgcgcgccgaggtcaagtccactaggacgatctgggatgaattccgacgggcgtggagaaaggatcgaaggtttttcgatttcggcaaagatgacaaacagagggagcgagtgtttagggatcacctgcgcgaactgggcgagaggaaacgggcggatgccaagcgggcggaacaggatttctttgatttgctcaaggagcacgacgagatcaagccggattcggattggttgcaggtgcgttctcaccgcaggcccacgtcggtgacgtgttttggatgcgtacatgcgctgatcgatggttcgcctcctctgcaggtcaaaggcagcatgacgtctgatccgaggtacgatgccgtcggttcgtcgtccctccgagcggagcttttccagcgccatatcaagtcgctcgcctcgcaggccgagtcggctcgaaccgagacgccggaagagatcgctgcgaaaaaggctcgggaacgaaaggaaaaggcacaagcgagtctgcgggaacgacaacaacaggttcagggcgaaaagatgcgtctcgagcgggacgtgatgaagagcaagctgggcgccggcagggaagatggagagcgagagtttggtagtctcctgatccaggccgtccgtgaacacaacgtgagtcaccacctcgagtcacgtctgccccctcgactcacgccaagctcgtttccttgcagacctcatggcaagactcaatacctctgttggaaaaggatccccgttgggaacacccagcactgaccttggccgacaagcacgacatgtttatcgcccacctccaagccctagcccacaaacgactcgacgctctgcacaaactattcctcgcccacgcacccttgctaaacacgccattcgaagacgtctacccagagattgtcaacgactttgctgtcacccggctgggactgacaccggaaaaactgcaaagccggtacgaagagtggcaaaaggttcgattccagcagagcaaagccgagttccaggcgctcctcaaggagagcagctttgtcgacttttggggacgaatgaagaacaaggcgatcgctggccagggtatcattccgaacgaagactctgatgaagaggatgatgccgacgagacgggtggcaaggccaatctagaggtgatggccaagcagatcgatctaaaggagatgcatgacgtgttacaggtcagtcggggtgacggggcttgggcaactcgttccggtcgtgggactgacagatgatggtcctcgtctcgccacagcatgacaagcgatatctcatgttcgaccacgtcccagaggagagggaggcttggcttcgggtgagtgcgactttcatctcgtcgtcgtatcgaactatcagctgactcgaccgcgatcgcaggaatacctggctggtcttgacaacgcattggccaacttgcacgtacaggctacgcatccggcataataatcgagccccctccgacgaatgtaaaattaaaaaggcatacaactaatcgtaatacattgccaacctgttcgaccttgaacctgcttttaagcgatccggacgatatgtaccgactgatcccaactcgcggtcgcaagttcgttacgatcctgcattgaccaagctagtccatgcaggaattctcggtgacgagcataggtagtgatgtgtggatctcgggattgcttggcttcgatgttccagctggaacgtcgcgaaacaatgtgttcagctagcatgtcccagagtccaagtatatccgaactctggtactcacactcggcacgtcatgtcatacgaactggatgccagcaggttgcgttcaaacggactccatctggaaaggagcgacgcttcggtcatccgatgcacacacgcagcatcgcagcattttcccccgactcactgtacccgcttgacggcaaacttgtgtcctcgcagttcgttggtctgaccgatttgggattgcgacggtccggcctgagcctgccttagatcccagaccttgacagtcgcgtccaccccacccgtggcgacgaggtcgggttggtacttgttccaatcaaacgtcaaggtttcgggttcgtgcgtcttagcatcgagaacgcaaggggtcggtgcgcggaggtcgtacaagacgaatcgaccggtcgatgtggttgatccgatgatgtgaggcagatggggcgaaaagagacaggtatagacgcattcggatgggatgtctgccgatcgccggagtgtacggagcggtgctggtgaggaagtgtcccactgggcgaaacagtctgtcagcgatgagcatacggtcgacctgacgatcgcgacctaccaatacgacggatccgtcccagctgcagctagcgaacttggtcttgtctgtggcgaaacgaggttccatgcctcagcatagaatagccgaccttgaagcgacgccagaggactcgcctagattactagaatcgattccaaagacctctttcgaatgccctctccatgtcatcctggggcgcacgtcctactatcgcaagatccatgcaggcgatgttagctctctcgcaggttcatgttccgacgtttctgggacgtacggtagatgtcaaagtcgcatcatacaagagacagctaccatctccacatgcgacgagcacatggtccggatgattctccgaccatgcaagatcgaaagcgcaatctggagtctcgaagctgtgtggaagcaggatgccttcagccttgcattcccggttgacgcacgttcgagagatcggactcgccgtttctcaacccgcaaaccttttccttgaggtccatctactttgcgtaagacatggatcgctcccgtgcccgagagtccaaagttggtccccgaggcgacggccaatcgatcggggtcaaagggggaataggcgatggcgttgtgagcgtagctcgggagcctgatctggagtcccgtcgaagccatcggcggcatggaggtcgagattgtcatccaggcttttgcatttcccggagagtggtcgggattcgttgtcgagcgatgttgctcgacgtagccggtgtcgtcgtatagtctttcccggtatgctcgatcgacttcaccggcttttccttttcagcgtatcgatttcagtttcagtgcagtttgacgtaaacgatacgatcatgtccgctcgaccatgtctgcggacctgaagtttcagtcaagggatagcaaactatatgcgacttgccgtttggtcgagctactgatatcatcatcgtcgtcgttgtcgtctccgggaaacgacgattgatcgagttaccgacccgcaaaagtgaaaacgacggacttgaccgaaacaaaaacatgatgacgatgacgatatgtttgcaacaatcggaaatcgagtcgtggcaggcgaataccgttcgctgtcaaagtagctgctactactaactcctgatgtgatgctagagttgcgtcgtgtggagatgtcatgtgctacagatggtgttatacaacaaactcgttttcgtttgcacgtgccggtcgctagatggtaagggcggtacggtccgacccgggtcgctcgacagaatcatcccatgacctcgcttgattttgtgcaggccaaagtagacgtcgagatgttacgtgccaaagcacatcctgccctgcgagtcgtttcgcttctcatgagactggattcgttccatggcagggctgggcccagtccccatccccctccacggcctgatcgtcgccttccgtttctacgatccaaactctcttctccactcagggcatctgtcccgcttgacactccctatgcccatctatcccgggtggtcccaatattgtccacatccacacccgccttgtacgccttgcccttgaagaagggcaacctgaacatggcaaactgttcctcgctcgaataccccgccgcggtgcccctattgatatccgctcccgtgggtgtatcattgacgtacaccttgaagggtgacgagctcggtgtccgtgcgttcagatccgccgatgccgagggaggggtagggaggggaagcacggtctctagggatccgggtccgagggccgggttggggtgtacggatccgatgagcgggggcatggcatcagaaggtcgggaggtgttgctctcggtagggagagcgtgggtttgtggcatgctcgctcgtttctcggcgagttcttcttcgatcgtcttcatcgtcgcacgttgagatgcgggtggcaacaggtcctcgacatcgccctgccgtggagaggtggatgatgtgttagcaatgttttcaggcgataatatgcgtggatgatcgaatgaatgggtgtacgagcttggactcacaaagtcttcctgcttgaccgcctggatcgagtaaaagtagacacctccgatgaacgcagccactccgagtcctgtgaacgcgtttctgtacaagaatggattccgagctcgcttcagtgccgccgaggttttctattcaaatgtagtccgagtgtggtaaggaaatgagaggagcgaaggtcagtgaggttggtcgtcgtttctagatttggcgttcgatctgtcgactgacatagccatctgggtgatatgacgccgcggccgatgtttttgacgaggcgggagtggacatggtcgaggatcaaatatcgattcgagtcgttaaagtctaggtcagagtcgtgagcgatgtcagaggtaatgtggtcatcatcatctgcaagatcatggccagtcgatctctacccttcgatgaggtcgacactcggttgcgcttaagttgcagaaagagggttgcgcttctagttgtcgtcaatctaaaccttactcgacatgaaacacgactcatccgggtcttcctttcagccaaatggcgacatgatcgcagtctagatggagtcaggagtccatttcatggtcgtaactccctagccccttgatactcaggagaaacacggcctcgcaggtcgatccagaacggccataaagcgcgacaatgtccagctcgtcaattatcccaattgcgattctcaccaccaccttcttcatcccaatccgcattcctcctccccctccccccaaatttcctctttgtcttgctcccctcaatcgccctacctcacctttcgaagcaatgacctactcggacgtcgcctactttggcgcgcagatgccggtcgcgctgaactcgactttcaattcgaccctcaacgcgacgctcagtgactcgatccagacgatcgacattcctctgttcggagcgacttggaaccctttcttgctgatcttccacttgctcgatgatcccaagatcaaggcgagtccatcgcgcctctcattagccatcttgcctatcagatggtggtcaaatgggatgtcaactgaccgtcggttctttgtctgtacctaggactacgtcggtctgatcggtctcggtttagtcgccgaatttactcgtcgattgagcaagtattttttcccctggatcgagaccaagatctgcgttcgcgcggcctcgtcggcgttggatcctagtcatgattacctcttgtcttactggatcgctcagaagcaatggatcgagcacgctaaacgattgcaagtcaccctttctgcgtatagaaccctgagtttcatttgggctgatgatcgctcgactctgatgccgacgtagcgaggccgaaacttctaccatctccggagctgcacgagccatgccttgttagtctcgatgtgggcgcggattggcgatgtccacttacatattgattatttgtgccggtacttacagggcttcaacactttggaaagaagggagcttccaagggcaagggcaagtcaactagaattgtatcaaggttatgcctccaactaaacacccgcttttaccgactctcaggagccattctcgaaaagcgttctccgcctacggtcagggccatgcccaagtttggtgaatcgatcacgttctggtggcggcgacgactcgtaaggttgtcccgcgagcttaatgacgagcaacacgattctacgatgcatcagtggatcgtctgtcggtaagtcctcggtcgtcatttgagtctgctctatcgcctcgccgctaagaacatcatcccgcttgcctcgatctagcatctttgggggtgatttgcaaacctacaaagactttttggcagaggcaaagaccaatttccaggaagacgatgacgaactacttcctatcaagatgatcgagaccaaagacggaggtcgatggaatcaagtggctcttcgttccaagcgacccatctcgagcgtgattacatcgaacggcatcgccgaaaaggtagaaaaggacatgaaagagttcctcgactctgaaccttggtacacgaaccgaggtattccttggcgacgcgggtatttgctatacggtacgtttcagcttgatctgttgccaggtctacaagatgatctggcttaacatcggcgcttcatcattccctcgtacaggacaagcgggtagtggaaagacctcgctcatccacgcctgcgccagtgctctcgacctcgaagtctattgcatcaccttggccacagaagggttgaacgatgccatcttgctcaaggccatgactttggttcctcccggaggagtcgtcgtcatggaagatgtcgacgttgccatccccaaaagcgcaaatgaaggtttgaaacgagacggaacgcaaaagaagaaagacgatcagaagaaagcagaacgcaacggagatcgtggcagctcgggtggctccatcacactttcgggtaagtgtactatcaccttgcctcgtgtggacaccgcctgatcttaccgcacggtgtttcccgcaaaacaggattgctgaacgccatcgacggtatctctggaagcgatgggaggttgctcttcatgaccacgtgagttacccctttgtcagcctgactagcgaaaacttgccgctcacccagcaaactgcctcagtaacaagaaggaaaccctcgatgaagccttgatccgacctggacgagcggacctcagtttcgaattcttcaacgcgaccacggaccagatcgagcgcatgttcaaggctttctaccccgctgacgagatgatccaagtcgaccgttctcgcgacgacgccggttcggacgacgaagaggaagagaagaacatctggaccgacaagtacattgaggaactcgccaagttgtactctgccaagattcccaaagatctcctctctaccgctgctattcaaggtaagcgcgaaaagcgctgatcgtcctggtcttggagtgctaaccatactgacataccacaggtcatctgatggtgcacaagaagtcgcctcgcaccgccgtcgggaccatcggggagtacgtcgagaagaagcaggccgagatcgccaagactaaacaagaaaaggccaaagccgaggagaagagcaaggaggcgcaagaggagacggaggggaagacggacgaaggcgaacaggtcaaagaggaagccgccaatctcgccgttgccgccatcatcgagatcgtcaaagaagccatccagaaccccaagaagaagtccgagtcgtcggatgaggccaagatcgaggtggaacggatcgattctcagccgctcgacgagcagcgcaaggcggacaacctcttggtcgaagtcgatggcgttctgtagaggatcgcgacgatatgtaccgagatttttgatggcgatacatcatcacgcctcttccccatagtgttccttcatgattcgttccgtaaactgaccaaaagtttcaccatccttaccaatgatttcgtcaacgttgggttgaaggaaaaaggcgaacgtctctcttgacacgttaccgccctcccgcccagcagtgacgtagtgaggcgtggccgcgagttttccctcggtgagtacctgtaatgcttcgccagtctgaaaagctagagtcgcgatgcggaccgattagcgtattccgttttcacgcaatttccaagcatgttaccaacctaggcagtccgccgggatggagactttgaccggctcggctcctttttgccgaggacagatccacaatccggcgttcgcatcaggaggcggcaccaccttgggctcgccctcaccttcgtgagagaggtacatggccgagcctgtcccacattgttccgagcatatcagcctcgctcgtctgcgctagcgttgtaagttggactcacaaagcccggtcaagacactgtggtcgagatgcatcccacaagcatcgtcgtcggccgcgacctcgttccccttcttctcggctgagggcgggaagtagtgcagtaacctagccttgttacattgcgagttggcaatcatgtctgcaatcgaggtcgtcctggaggaggcctgcgaagagactgcaagggcgtcgcgagatatagagttcagcgggacggattgcggtgtcggggcagacatgggacctaccgaagccttcacacgctttggccaccagcttgccaacctcgaagatgaactttccgagtctgcgatcgatcattttgaagtggaagtcagctctcggtggcaacggagaaaggcctaaagccccggtcttactctttgaatgccacctcgaagtcttgcaatccctcttcagtccgctcgggccagacgttttcgccatagtacctgtaggtagatcggcaaccccatcgacaaatcagaccaaattccatctcaaagacgatacccaatcgacggtagacctacacgtgatgctctgcgcgttgctcttccgtgacgttgggacgatcaacgagcgggttggcgtagtacgatcctgtttcaccagatgggcaacatcagcttggctgaacagggattccaaggtttgctatcaatgcctaccttttaaaagatccgggcgctgaaattaggatacagacgcaagatcaagatggtgagcaatgatcttgtctcgtcatggctacgaaagcagctgaatgcttaccccattcatgatctccttgccgtgcgaccagccgaacctgcaagtacaaagtatccattcaacggtggttcaatgacagaaaacgtgcatgagatgatctcagacgactcacatgtactgttgttccttcctggcgtacttttcccttacgtcttcgggcaaactggcaaacttgtcggcgagccgcaagagccgttccctcaacgccgggaactctgccggtagacctggtacacacgaagagaaacggtcccatcagcaacatatacatgcacaagactagtaggacctcgcgatgtactgacccttaataacaatcgctccgagagcatcgttgccgttcccgaacgctgctttgaagtctgcttcgagagagcgtgggtcactcttgagcgcgttgtaatcgatcgtgacggcggcggacatggatttcggatgatctgactatgggctgagcgtgatgtagacgaacggtaattcctcagctatgagtgtcgcttcatgttgatatgatagtaagaaagagagacacgacaacatgtccaacttgaaggtggcatgcatgtcgctccgatgtgatcggccgagccggcgttggaattgacccggccgagtttcggctatgaccgacgatgaacgacatcaccttctcgacctcatactgacctcgctcatgactcattccctatcatctcagttcttgctttgctaagatttgcataccggattggagcgtgagtcaaaggaggaggagggatgccgagtcagaagagagcgctgatttgaactgagagcgcagtgggccggaaaaggacgatgggtatgctgctgacttgtcacttgaagcgggatccaaggctgccgtcaagaaccttgtataaatagacaattatctacagatggagacgtaaagacaggcatcgatatacaaaccgtggcacgctcaaggacacgacatcggaatgatgctggcgagtggagatgctaacccctattgctgttaactcgaaccatgcaactatgctatcgacaatgaacatacaacaatgttacaacccgacacttctcgcacctaaacgccatccggctgatcatccccatgcgaacccctcacaacttccacctcttgcccaaccaaatcatcccaatggcagccatcaagcacgacacgctcgacacccagaacgtgatctcgaaacacatcgttccttgacaccggggtcgaccgtcgtcgtcgtcctcgcccgtcccaggggatcgacggcgggattgatgtccgccctggtattccgagatgaaggcgtagaggtactgttaccccgcagagaaaaaaaaagtcagccttggcaatcgttccagttgtgtcgatgacgctcctgctcaccgaaaagaagatggctccagcggcgacaaagtactgttatgttcgtaccacgcgatcgtcagcttcgagatttgggacgcgccgacatcaactgggggtgtacccaccgagaccatgccccaagcgagcccgaaatgtcccggtccgaaatgtctcgaagtgacagcaggtctatcgtcgacggggagaccaagacacgcggtcagggaccccgaacctgacggccctgatgctgaccggaacgcgaactcacgtgatggtaaagacggcaccgtacatcccaccgacaccgatactgaggagatccaacccgtcgaccgacctgatgcccaaggcgccccagagtaatgctccggcgaggacgacgagacaccctgcggcgaggatggacctgtcgacggtacgacgacgacttccgggtacaggggagacgggggagaggtaatcgacgaggacaccggtgacgagacgggcgacggtggaagagaccgagagcaagaggacgaggtgagatcggagtacgagggaccgatcggcgtcgttgtaatcgtcggacagcgagttggcgatcgagccgatattgctcaacaccatctcggccggacccatcccgaggagcatgaccgtgccaaacgcccacaatccgcgattcatcccgaggctcttgaaatcccaatcgacctggccttctgtgatgaccttgccctctggatcggcatcgccttcggcctcgaggatggtcggtgggcgactcgccagcctggctcggatggaagccgtctcctcgacgaccgacgcgtagagggctccaggtccaccgatgagcaacggcgtgtgttcgtttgggtcgacaatcttgatggacgacgcgatcgaagcgacgcggtggttcgaggccgtcgtggtgagtcgtccgacggcgaggtgttgttgatcgcgacgggaacgacggagaccgtggtcctctagctcgcggtgcaaggaggccgacaagtcgggtgcggcgtcggctccgatggtcgtattcgttcgtgtcgaatgggcaaacgagacgtcacccacgtcttggtcgtccaggctgaaattgtcggcatcgacgccgggactcgacaacaagggctgaccctcgtcggcatcgacgtcctgcacctgattcggatcgtccgggtacgactcgacggcggcggacgagacgaacaaccagatcgaggcgaacaggttgatgcagggtacgagcacgcccaagaaccgggtcaatcggatcggatcgagttgaccggtctcgtcgtccccaaacaggctggaccgtgcgatactgctgagtgtcaagctactcagaccgtaacagctaagtggcaagctgagcgccagggtggggtatcgagggaactggagcgccgcggtggtcaacgaggaaaagtaagcgccgatggcggcgccaccgaggcaaaagtaggaaagagcgaggaggatggggagtggagaggatccgcccgaggtgttgtcgtccggatccaagccgtcgatcgaggagccagggaaacggtccttgcaggtcaggatgagggcaaaggattgataccccacaaaggacagtacggcggacagcaacgaagcgctgcgaggtcaagcgaatgcgtctccacatcagcctagacccccgccgatcgaacctcgtccgtcgaccctcgcgctcacactcacgctctaggtcccttcttatccgagaacctgccaagaggtgcggccccgaggtaagtccccagtacaccgccgagcgcgatggtcgatccttgagtgacggatagtccgagtcgctcgatgacgatcggtccgtaagtcggccagacgtatggtccgttggccgtcagcgcgttcagggctgtgtcggcgcagtatacggtgggcaaggtcatcgttcagtgatcatgactctccaggaactcaggaacgacgtcccgactgaccgatggagaggcatgtcaagggcaaggtgatggcagccgggtaatgatgtacatgcgtgatcctcttccatactgattgattcggagcgagctttgtgggtggtgggagtgccatgagcgagtctacacgagacgtcgtcggagcgataatagtggtcgtgatgatgacatggtatgcaaacaaggcgaaagaacacgatcgatgagctcgttcgatatgaatgatacgcgcaatctcgactcgaggtggatgcaagagctttaccttgatcgtcggcaaaggtcaaggtcggtctgaccaggtcttcgtggctgaatccggaagctctcgatgagatggataatgatctggttcgaccatgaatatgtaatcgtcctggtcgatggtggccaggtaagaggtcgggcggtgccgtggtcgtggtcgagtttgtgttgtgacgaggtgatgtcgagcgcgatgacgatgatgatgcgagtcgacgaggtgacaatcgaccgatggccctatcgatatttgaatcgctcgccatgtccaccgacactcagtccaaggtacatcacatcacaatgttatcccagttaaagcgacgatgtagatagaagtttacaacgtacaactctactcttgactacctagtaactagtctcgtcgttcctggtttccgcagagtccaagttcaaattcacgagccatccaggacccaggttgatgacgatgacgatgatggtgatggtgatggtgatggtgatcagcctatacctcgtatcatattcaccccacaacactctactaccctgatcacaccccttcatcacttcactccgccatccacctccgccgtccaccatcatgccatccgatgctgcttactggctcgtatcggccccgctaaagaacggcaacgagaccgacctctttcgatccataaagacggtcgtcaccgataataccctcatcggcggactcgaattgccaagcttgaaggcaagtccgcacggggcatcatatcgttcttcatgacgatgtgatgacaagtgatcaatcagcaacgccttcgctcgaaccccatcactgaccacatccccccctttctccctttctcgtgctccgacagtccggcaccttgtcctcgctgttgaccctcagtgacacgttgccaaaacacgacgcctactttacctcggtcgtaggtaaactcctcgataccatcaagaacctcgcctctggttcgtccggatcgagcgcacaagaaggtcggaacggtggacccgccgacgaggacgagatcaagaacaagctcgagtcgtacgcccgcgtcaatgatctcccgcccacgtcctacctcatccctcattccggatcggaacaaggatggacctgggatgccgctcgatggggggatgataacaaggtgacagacgtcgtcgacgctctggtcaaggagatgaattcgatagattcgatccagaagcaaaagtctcagggttacaatctggcaaaggggagtctggccgggatgcagaggaaaaagatgtgagtgccagcggggagtggtcgacctgccgaacatcccaccgaacatctatgctgagtccgacgacctcgcgcacgactcgtgatcaggggcaacttgtcgacgaaatcactcgtcgggatcgtcagccgggaagacgttgtcgtcgatagcgaatacctcgagacactgctcgtcgccgtgcccaagtgagtcctccccgtggcgccgtctacgcagtcgtcattacgacacgatcgctgacgagcgacggacgatagcaacctcgtacgcgactggaaggaaaagtacgaacgactcaccacgatggtcgtccctaggagcagctcgtgagtcggtttctctcactcgactgctcgtactttcactgacatcggctcgcagggagatcaccaaggacgacgagtacacgttgttcaacgtgaccgtcttcaaaaaggtcaaggacgagtttttgcacaagtgtcgagaacacaagtgagtcgtcggtagccggcctcgtacatcctcatcgtccgtcgtgtcgctgatgaatgactctgggtgcgcccgactaggttcttggctcgagaattcgcattcgatgacgaggccgaggagcgtcagcagcaggagatgcaagaggcttcggccgaggaaaaggagctctgggtaggtcgcttcacgcacgcacgcccttggggatccacgtcgactgacctcggtctcccgttgcatagaccgacctcttgcggttgtcgaggaccaacttttccgaagcttaccagttgctcgtccacctcaaggtcgtccgtctctacgtcgagagcgtgctgcggtatggtctgccagcagagtactctgccattgtattacaggtgagtttcgtccatgtcttcatcgattgacatgcaaaaaaggtgcgaaccagacgggggctgattcctgacttgaattatacgcatatcagcccgaggccaagacctcgctcaagacgttgaaatccctctcgtcctactttcaattcctcgcatcaaaggagcgaagcacggcgaaaaagtcgtcgtccgggaccgcagggcaggacgagattgccggcgagtggggcgccgtgatggagcaagagtattacgatttcgtcctgttcgaggtacccaaggtcgtcacatgaggccggcggattgatgacgatagatgactggtgttttgttgtagaccccgcccgctcgccagtatgtcagagggatcccgcgatattggatccattcttgtgctcgtacacctctgtttgttcttgtcacgaccgcatagcacatattttatttatacctcggacaggttctcggcggttttttctagtggtctgatacatatgctgcgctcatcactttggttgctgcattcaccagcaacgtacaactgcatgagttcaaacgaacataagcgcccggtctgtcccttcacgaccaggtcttcttcaactgtcaaaaccaaccacaccaaaccgaaaccctccagaaataagagaaaaaatcgctggtaccacatctgctaaatttctcgaggtccaagctgagtggaaatactgcaggaaaatcggatggacaagttgcggtagagttggagcgaaagaatgcatgatccctacataagaaagggagacaagaaaggctagaccggatgcatccgctgagacaatgtcatgcctgaaattgtctgagatgtatttgttgaccctgggacctatctggtcgctcccgtttctgacctcgcaacaaaatcctctcatatagacctctcctcagctctgaatcgcacacacagcacttgaacctctcatgacgtctcctcaagctagcttgctggtggctatcgggacaggtcgcagttaagcgtgcgcaacaggaagcccccaattagcatatgaaatgtcgatgttggcccccctttcctttcccagattgccacaaagtcgagtcagaagacgagggtaaggaacaggatgatggcagagatagatacaagtaaagtaatgcagaaaacgatcaataatatattgaaaatcatgttaaaaggttgatggtgttttttgatgttgctgttgccagtggtgtagtcgcgctagtaagtggtggcggtggtggtggtataacgattgaagtttgtgatagcgactgtttgcaaagtgatggtgtggcgcaaacaaggttcagagagctagacaacctattacaaatcacgcatcgcatctttgattatgctgacaacgaaatgtcctgtgaaggcgcttttcggtgaccttcccggaagtcaccatcgaaaaggagtatgagatcaagcagtcggctatggattgcatcggattatgcccagaaagcaagacgcttggacatgggataaagtgaggtgagtggtctgataagtactaattgaattggcttcagggtatcgaacttaccgtacaactcaagcactggtttcagccagctttccacaaccacggaggatttgtgcgactgaagagctttctaggcaaacggcaaagcgaaccgatgcgaagcaaaagagcgaagcgaagcaataatgcgaaccaatgcgaaacaaagaaagttgcaaaccaagaacggcgggttgagagagaggctcgtttgccggactccttttggtgcggggatcaagctgaagaccattgagatcaccgccgcgctgctcaaattggtcgatcaacggatctgccagcactaagtcgatcagaccgaaggagaggtgagatatcatgtcgaccaatcggcccccgccattgactctcagacaggcggacacgcgctcaactgttcaacgaagcatggcgaattccaactcaaccatttgtttgcgactttttgcgactgcaccgaactggtcatccttccctggtcgtccgcataactgatgaaacgaggggtccacgacttgtactggccggcatgacgatctcggctgaagcttgcgaatttctccagtcgtaatatctcgcgctggatttgcaatgcacgtgctcgttgatacacattagttgaggaatattgatgtcgcttgttaagcatgcacttctcgaacacaacggtgacgacccatggaaaccctagaatgcctcccatatcagtcgtccttcctgccagccctcctcgcggtcagacccgctgcgctcggactgccgttggccatcatcggtgctggcgagacggaccgagatgaagggcccatcgacccgggttcctcgctcatgtaggccgtggtcatgccatttccatacggtgatgatgaagcatcatgagcgttcgacggcgtacccatacgtcgaggcgctaccgagctccctgtggctccgctcacgttgatctcgctcgctgtccgtcgagggggcggggcgttgatcttgagaggtgagagcatggcccggttggcgaccgagtttgaaaagctggacgaaggggagagtccgccgacgctggctccaccgggtgtcagattgttggcgcctccaggaacgtcaggcgctccccaaggcgagtaaccttgaggttggataccaggcgaaggcatgggcgagccgcgaagaggggtacgaggggcaatgatgccctcgtcgtttcgcttgctcctaccgccgatcctcggtaagagtgagagcaagggcgcgaggatggatttaacgagggacgtccgaggagcaatataggcataagatcgcgaattgacgcctgcaggagggaagccgtccttgggggtacctaggtcgaattgaccaggtatcgatgagggtgtaccgggaatcgtgtctatggtatcggggcatgacgcacgttcagtatggcagcttgacagacgaagtcatctgtaactcaccttgcgatggcaatacattgtcattggcgctcaggctcaagaagaggaagagcggcacgagccagacgcagatggcaaagaatgctgccacgtccatgaagctgggagcatcgatggtgctcgtctttgctccatatcggtatcgaggctgtctcttggccttggcctcctgtgccttttccgcaaaatagaagaaccagagaaagtgatccgcgacgaccatgacgcaggacaagaggaacctgggtgaagtgagcgagatgaagggccattgagccgtaaagttggtgaggtagacggcgtgtgcggcgagcgaaaatccgatgagggtgaagggcagtcgatcaaagacgaggagcaggacatggactaccatgatggcctagagacaagagtacaaaacgtatttgcaggtcagcccatatcacgatgtggaccggttcgcgtggtcggtcactcacgtagaccgcccgcatcccgaccactttggccgtctttgaatgctcttcgatcagctcggcgagccataagagaccactcgctgaaagataatgtcgagttcagttacgcagttatattcgctacttgaccatgcagactagcagcgccgacactgacctaatgacagcgtgacgaacaggaacgcgaccacgctgcctacataggacagcaagtggagcaaagtcatcctaggcgactagacggtatggactttttcgaccaaggctagtgtcaagaggtagcaataatataaatgattggagaggtaggcatgtagatggataatagtagttgtgcacattgaggttattcatccttttcctacctgtgttcttgctggagcgggagcatccgagcgagtcgatggatgacgcggaaattcaaaaacgacgtggtgggtggatgaagtgttacacggcatcgcatctataatattcaacagcaccaacacacaacactctggatcatgctggagggtagaagccagcccataacgccaagctgatggctccccaagtacaagaccagacgataccacgtcgagtccacttggacgccaagccgacgctccggcctgtacctctgtcgcccgagctcaagagcgcgcccacgatccagaacagcgccgggttagccatcgagacccgcaatgcaatctgagtatgagacgcaaagacgaggatgaatgtcgtgacgatgtgaatcgcgaaaaagggcatggcgtccgggttccgccagagggttcgatcgaggtcgtccgcgtatgatcgggccgacgcagacgctcgtcgagattgtcgactcgagtctgctgtcagtatcgacgagcgacggctggccagatagagccggcagatgccgacaatagatgccaacagtatgggcgaggccaaaagaaagttgggtatctgagctggcgtccaatatcgcaaaaagccgacgtccctgcaagagcgcgacttgagctacacttgctacacactgaattctctcgaaaggctcaccaatagtgcttctggatgaaactatatgccaaaggtagcttctggttgcaccaagatcgtgtatcgctagagccttgcttggtgggcgtgcagaatgcggtgtacgagtaatattgaaacgccgcgaacggcaaaagcacaagcaggcactcgacgcttgataacagaaccattcgaagcgtagtctgtgcgagaatgtcagctgtaagatccaaaatccctaattgtatgtttggacgtgacccaccatggaatttcggaaccgttgttcgtacatcctaagcatcactggccagacgaggaccgcacaattgagtatgcccaagcttcgagtcccgcttgccaacataaggcaggctatcccgatggcccgaatgacgatcttcctcatcttctgtatggccgtgtacagcctatcccggcgaggtctagtagtggccacgtcgaacggctcgggtgcggtcaaggtggatgtcgtgatgaccagccaacttccgagaaaggtgcagagcgtatagaaaggctccgtgtacggtactgagccgatggcaggcgctggaaggagcgcgtacaacgaggcacataactgtgtaaactggtcgttccgggtgacctgtcgagtgagcctgtaggttgacacgaatttggtgaatgagttctcctgctcttcgcatgacgagaaggacgtaccaagctggagctgacctacttctggaaaacaacgacattcagaacgcttatgacgttcgtcagaatgactcctcccaacacgacgtcggtcatgtctaacgcttggatcgacgggctgggtgtgcttttgagcaatagcctgacaaacatcccactccaacgcatcatgagtggccagatcggcatgaaagccaactcttgctcatgttgatatcctcgcacggcgatttgtgaaaagtagaggttgtcccatttgacgaatgggtccaaggacctcgctagcctcgtcgagctggatgtcccagatgcagcgagtaggaccgaggtagacgtgtcgaacgccgcatcgaaagagacgattgaaggatgtacgagcactaaataacaaagagagagtactctggtaatgatggcgatggtcactgggctccgctttcatgtcgatcgggtcagccgatcgcaagggtgtctgcatttcaagtgatacgaccactcacccacctgttcgaacccatgatgtcactctcgctgtctcgtcgcctggaccagttgctcttcgggagaggattccaggtccccagtcctcgccacccttgcgtgaacatggaatgagagtgtactaccaagaggccaagagcagtcgcgaaacgatatccaaactgatatggatgtgaacccaaaacgatcatatcggcctcgtaggggctgaggagcggaagcgaatgtgaaccgagctcgaggtgacgaagccgatccagagaagcagccaacacccactcgatcatgtacctatcatgtctaccatctcgagatctcctctcacacactactactactgctatatacaagtgcctcgcttgtgatagtggagaggattgttacagttacatatctaatcggtacaatcagacttggtccggcagcttcaaaatatgagcaacctcgagagtgagtgagccggggcttacaatcaaggatatgttgttcgagtcctgacaaatcgtgctctcccgagcagaatcactattccagctcaaggtatttgctaccctcatacccagtcctcaaagctttgagctgatctcgcaaccaaattgtacgattttagtttacggccaagtcgttgcaaagacaggccaagaaggcaacaaaggatgagggtctcgagaaagccaagctgaagaaggtgaagactgtgatggcgtcggacgctcccagtgctgtgcggctgataccgcattcacccgaacatcaggctcttcagcagggtaataccgaaggagctcgtatctacgcatccaacgccatcaggaagaagactgaagggctcaacctactacgtctctcgtcccgaatcgacgccgtcgccagccgagtagaaacagctgtcaccatgcgccaagtgacagggagcatgggccaagtcgtcaagggaatggacaaagctatggagagcatgaacctggagagggtgcgtctagccctttgtgacagtaaacggccaaatcttctcgctaaacgctggacaagtttctgtagatctcggccgtgatggacaagttcgagacacaattctcggatctggacgtgcaaacatcatacatggagggcgcaatgtccagcaccacggctacgacgacacctcaagaccaagtagatctgctcatcaatcaagtcgcggacgaagcgggcttggagaagcagcaggagcttggtaacagcgtaccggaggggagcattaaggagcaggagcctattgcggccactcccgtcggggaggaggatggaagactagcacagagacttagagcgctcagggtaagcagcattggcgaatagcggtccgtgccatctggttaacagctgccttcgatctacttacagcctgctacctagcgccgtttacgggttggtccgggaactcgactttatcggttgtagacaagatgtcagacttgagataccaataacatcggtccgcattgtgaaaacaagcatgctgcacataatttctctacaacccgtttttacacgcatacacgcattatgtcaaggctacaaccgcaataaaggcacaaatatcaagcgaacgttacatcgtaagagatattccctatgaattacgacccgtcagcacggtcttctgcatcgtctcatgatgggttttgacgcttaccggacacactctcaatcgatatcttcctggtcgggaggggggtgtctgagcatcatgatctgctccgaaatctccctcttcgtctcgtctgtaagtaatgtggtaccctggcgggtcgaatcgccaaacatacgcatcattaaactcgagttgattcgcggtaaaaatcacgatgtgagacttaccgaacggacgaatcccttcaacggcaagctcgcccgttccatagcagtggaatattccgccagctgccccggatgagccatcaatctgctgtcggttcctgaagggcttgcgcggatcgagagaaccgctgacgattccgaccggctggcagcgttctcacatacagcatctgcgtatagcacgatgagtgcagtgccatctgctggtgtgatcgcgatcgatttggttgtcaacagccccttgatcttgccaagatttaccttttcttgatcctcccggctcatctccaattccgcctgggctatatggacaggcgaaagtgactcttgcaactcgggatgcttgaagcagcagtacttgccatacgagcacgagagctctgctaaatgcgctcggcagacggtaaagttgtaagagggcttgtacaccggtgttgacgactcgacagtcatagcaatcgcttgaagctcgctgcatatcgtaggagtggtataaagtcgtttgcgaatgcgaggcagcacacgttggcccagtacgctccgacacgagggcgaagtcttcgattcgatttctcctgtggccatgcgatcgcgagcagcgccactgaccggctgcagcaccgacggtggcgtttgaacgtcgatgagcagtgacgtggctgccccttctccaaagacatcttgatacatcggtggcagattgcctggagctgcctctcgaccttgataggcaaaagccacggcatcgatcgactcgatgctggccgagtcgtctcgctcctcctcctgctggcgctctgacccgggattcgggccatcgagctgaagttccagcctcttgacgattgtttggctcgtcatctcgttggagccagccgaaaccagcgtcggacgatgagtattggtcatgacggggtaaaaaggatcctcgttgctatcataatcgtcctcgtaaggcagcgggattctagtcttgaccaacgaatcgggcgccgaattcccaggcttgacctttgaaggggtctcaggtgaggcctgtaaaggtggaggtgctcgaacagaaaccacctttttggccctcggggcaaaaaggggaacggtagacgtctccctagcgagcgtggtaggtggcggctgcgcggtcggacgaaacggctgggggcctagtatgcggagacccgatggtggtgaaccgtacgaagaagtgatgggagggaacttaaatatggattccgaaacgcgactatctggtttgcgaagtccggagtcgggtccattatgggtattcctgagcccgcctagatgccgatcgagagggagtcgagggttgtgaccgtccgtgatacgcgggttgaagggtttcgaccatggactcaagccggaagaagtctttgtgtcagcgattccgtgccgaagctctggctgattctgctcctgttcaggcaggttggtgttcggtttgaccgtcagcacgaagtggtccagacctctgaccgaaatcttttgccagttgccgcttagatctatcagaggttcctcttcgtcctgaacctcgacctcgagctgactgggcttgacccgatcgggagtgactttccgattactcttgaaggcgccttggagggcaatgctgaaggctctgtttggggccgggcttgccctgttcctttttcccagctctacctccggcgatgacggaacggtcgtgatatgagacagcggggtggtgggaagtgaagggctggaagcgagacttttgcctggacataacgctggtgtagctttactctcctcgtcattaccagatccattgggatttcggaagctggacgacaatctacgagcattcccatctggtgctacgctggatcgtttcctgacgagcttcttgttgcccatggcgtccatggcgttaattgcttggcccttttcagccgacctgctcatcgaaagggtcctcagataagtacccacacgattgacgtatgtacgacgcccagttttacttacacccgtagagcttcgatctgagatctgaaacttccgggcagtcagacccttcgcccagcgggacgaggtccggtcgtctgacggttctttgaccggtcaaccaggagaaagcgactagaagttcccgtgtctttcaatagtttgccgaacaggtttttataacctacagaattctttttccttgtcctcaagaaatcgcaatgaccctgttttccccctcgatgcctttttcgacgaaaatatgacaatcatcatcaatcgatccaactcagtcgccccaaatttgcttccgaacattccgacgagaccggcgaaaccatctgaaacgcgacatcgacctgatatacagtactggaccagtcaccaccaagagaccggctcacaagtcataggcttggagaaataatacagctcgatacgctcgtcgtcgcttggctctgaatacatacaaagtggaggtgatccctctcgggtcggctcggacgaaatgcttgcttgcacggtgtcccgcgaaactctcagtccatctgttcccaccccaaatcttctagcgaccacccaaagacgttccggctgaccatgatatctccggtctgtccataaacctgcaggtgacacaactttccaggctcacggtgcagctgactcatggcgtcgaagtcagtctgttcgagatggaatatctaagcgccatcgagatcagcctcattcccttacaagaggggactcgtaccatcgaacaaaaactcacttcgagattggctttcatcctttccggattggccgacttgggtactacactccagtcaccacgttgcacaacccagctgaggaggacggctgcaggtgtcttgccatatttctcgctcagcttgacgaccaactcgtcaatgagcaagggcgaaggcttgtcagcagaagggcgccccaaggctgaaccaagatggtcatcccagtcagtgacatcacatcgtggacattctatatgtaatgaacgactcacgcgagtaagcagtcagatgaatccccttttctagacacatctcgtgcaatccttgttgcggcaggtacgggtgagactcgacctgacgaattggtcagatcagctatacgttcttgatcttgagccgtgtcgcaactcgcctgattgacggccggtaccacctcagcttcggctaacaaggctttcagattcctgacagaaaagttggatacgctgcgataagaattctccgttagcgtcaatccagcaaagcgactccgtctaaggaccgacccgatagctttgcagcgaccatcgtctagcaactgctccatctgcttccaggtttcgatgaacgtcggagctgctccgaaagggataacctcgtcagtttccggattcattgcttgtggccagtgcatgagctgtacgtcatcgccatgcattaggatcacaggctgcttcgcaaatcttggcagcccttacgtagaggtcgatgtactcaacgccgagcgctctgacattgcgctcgaagccttctttgacccttccgtggtcgcgattgctagtgataagggtcaaaggagaggttagcaattttctcatcacaaagggagtctgtccacacacttgagtttagtggtgacgaagatatcctttcgagggataccactctcccgaatggcttttcctaccgcttgctcgttcccatagccgtccgcctgtaggtgcgaagtatcgatgcgctcagtctgcggcgacgtacactgacgcctctttgctttgagctcacggtatcaagatgtcggtagcctactttaagggcgtcccgaaccatctgataagttgcaggattgtctgcttcgactctcttcagcatccagcatcccagtcccaccagcggaatcttggctccggtgtttaatatcgcggttttcgaagccatgatgtcgtgtcgtttgtcgttgttgcttgtaaccacagtaatggaaggtttacgaggttcttttcagttgagttggatgtgacgagcagagtgagatcgttttgtcgctgtcgttatatatatatactcgtctgtctcctcctcggtgatgagccggagaagcctcgggccgggaaaggcgaagtgatgacgtaatttacacttatgactgcatcacgcgtacgccacgtaaccttactctcccttcctttattcctccacgtttcatcttcttctttgttttgctaacggatgtcacatcgtttcagtcggtctttgtcgctctattatgttattatcggtccctttgcaggtgatgtgacgagtagtgatatcctttgcgatccctttctttgtgtgtgtggtgtgaccgatactatcgcatcaattctttactagcagtcaacaggtaaagcagtaattagaatagtgatcacatcgtgtttgaaagcttcttgcatctcccctggtccgatgtcactatcgcgaaattgcgcgataagcatatccggatttctggctgctacatccgcgctggtcgcatcatatattggtcatggtattctggaacttgcaactaaacgccaattcgccgatctttcactacatgacgcagagtcagggaacgggttgggagtctggagtggagagcaagaacaacgagagcgcgtcgtaccgttacacgactgacttgggtatatctacagtcgaattcgatcttgccggtaagtttctatttgtgagcgtgaatcgcaggctctgaccttggtgtccagcgactagtatcaggttcttgctgagctcggccgatggctcatgctctgcagtatacgccatcaacgcttcgaatcccattccagcatgcccacagaatggcgacgagtactttactgttgacggtctttcgatcggagatcgtcatcaaatatcctatacccccttgaccctccgacaaaaaggcaatcttgcacccagagtcttcggcatagaagcgtcgacgggggttaactcacgagacaggcacgttctccatattgagtgttgatatgggctaaagggactcccagctgaacgtcagtgcacgtctgtacagccagagctactacaacgcttctattgaagctacgacgcagaaaaacatcaacgggactgagtcgcaactttggtccagggtggccgcctcggatctggtacaagttcacggctataacggtacacaccctccagaagacggggggtatatcgtttcgacaacacgcggcgccgatgtgcattacgcttccagcagtgagtcatgttgttcagaatgagcataccctctgctgagcgcgagatcaacagacggccaagcgagtttcttgtacggtgttacgggaccatatatgggtagattacaaatcactgcaacgaacaggtcggttaccgtagtggatttgagtgtaagtcttgattctttctccccaggagaagtggagcatttcatgatccacgatacgcctctatagggaccagtaatggattatcatactctactgtacacggataccttcagtccgcgtaatcggttgctagaattgtctttgcgcaagttggattccaaagcaacgattctctccactatgctcgttactaaaatccgagctggcgccaggacaagcctatcaaaggaaaagaaactcataatcatcgtcgcggcaagtattggggggactgtcatattcctggttaccatcataacgctgctcttgcggtcgcgaaaagctcctcgaaatacaagcgctggagagccgcagtccgctcgcaaagatcgccgcctttcgacaaggtcaggcaacaaggtcactttatggtcgaatctgtggagcactttggctacgacgcctactcctcccagtgccgatggagcccttctgaagatctcgcctgacagtattcgagggaaatcgttcttccgggtagatcagggaaggtctgcagcgattcgcaacccatgggactcgcggattcggctttctaagcccttgacgaccgtaccccttgttcttgaggagaaggtacaggccgaaactccagctctaccaaacgctagcgatgagaagagtccagggagagactatcttattccatcctactatcactctgcagcttccgaaactgcctatactcaatttccgccagtcacgcagcgaaaagttgttccggtaggacaggttattcgtgcaggaatcttagggccagccataccttccagcagtggcacggtttcttcgcacggtttgagctttttgcacgattctccgggccctcgcgacaagcctgcgacgaaaatgcacatcgagaatagcctcggcgagaaagagcacttagcggccgggacatcgaagattccacataatccaacgatgatacgctcgaggtcccaacccccgactgatccggacaagagtactggccgaatcaagctaaacgagtcattgtctctcggctcgcttgagataccaggtcgggcaaggaaggaaagcgtcacgatacctcgaagcatcttcgtacagccgcaaagtacgggaaggccattagaaaagtcccagcgcttgacggcagtctcgccgctccgtgctcctgcaagcctattacgaagcttgtccggccgactgccgcgctcagaatccggcgatactgaggatcgagcgacgatccggtgggtaggccctcattcagacgccgactcgaacgagaggtctccggagatttacttcgagatgagaccgtactctcctacgacatcctgttcgcgaagtgcagtagcatcgacgcatgcaaatgcgactcgtcggcaggcagaaagatagccgtctgcatcccgagccgaaggtcggctgcaagatacttggtccaaggagatgagcagacgtcatttagattgaggagaacctctcttggatctcttgattatgtttgcaacaatgctgtgtatgatttcggttgcttgcttgcttttacaacctcaatgatgcctacaattgtttcacactccgcctatgatgctgcctagatatcatacacaggtagtcgaccttctagccatgtaattgttaccgagatcctgccacacgtctaccttgtacccaaacgtcggcgatgtcacgatcatcgctgacgaacaagaacctctcaaaattccgctttagcaaggcgaccctgtcttctcttgaccgctcgcgactcgtcgtgtcttcaccaatgtccagcaagaagccggggctagcaccgggagctacgcgcagtgcgtcgaattccttgccttctgcaaagttgccaatcttgtccttgaggttgcagatagatgctcctcccagagtggccatgtggaacagaaccgctatactcagcggcgtgtctgagtatttgcgcttcttggatggcttgttcgtgtcggcgttgagtgcgatcattttcgagagtttggaggcgtctctgatttgggacagaatcccaatagcgaatccgcctccgcagtcgcttccgaggcccacctcgataccttcgtccagcatggcacccactcgagcacctccgctcatcaagttgaagttgctagtcggacagtgactgatcccagcgtgttgatcgctgatcaatttcatctcaggctgcgatagccagacgcagtgggcgaggatggttcctttacggatcatattgtacttgtcgtaaaccgccgtgtagctcttgcagtcggggaagagttggagagtctctttgatctccgttgtattttcggaaagatgtgtttggatgtgaagtgtgggatcctcgacaatcaagtcgccgagtgaggccatgagttctgatgtgcaggacagcgcgaatcgaggggtcacgcaaggttgtaccagaggcgaagtctcgctgtcaggtgggcaaatggtgcgaatataggcgatgagcgctttggtagcctgtatggaatgctctgcagacggttcgcagtaatccggtggacaattgcggtccatgttgcactttccaatcagcgccctttgacctgtgagggacaaaatgaagagatgggcgaaaatgagtgacatccatttcgacatgacggagttgcgggacataccggcgcgaagagtggtctccgccagaattttggaagcactctcgtgtaagctagcgtaataagctgctgtggtgacctgttcaatgcaacgggacgcattagtacggaaatgaagaccaagtagatcgtgcgcgagtggtgtgaactcactccaacggataaggtacgcttaactacctccgcatatacggctgctgcgtaggttgaatccgagaacatggcctcacggggaaaggtgacattggacaaccagtccagcagctggtactcttgtcctatgccgagattagggtattgaggtgcatgctaaaaggtgggagctttaggagaccgtacactgcttaggttgatccggcttcacataccgtatgagtgtcgatcagacctggacataggaattcgtgaccttcaagttggacgatctcgacggcatagttcgagccatccaggatgaggccgtgagacgcagcccgttgttgaagctcactgctgtcgacatttttctcgatccacagaatgatcccatcggatgatacacagacaagagcgtcgaccgcgtactcgagctcatctagagagagggagtgtacgatgggtccgtgatagagcgtagtggatgcgcgcatgattgagggtatcgttgcaggttgatctggtcgttgttggttatcgtatgaccacgcgtacaggttctcgaagtctttcccgaatagaatggctatggatttattgtctctctatctgtctcgacaactcgaagcgtcagtatcggtgcgatcgtccgctcatcaagactgtatcatgattcttcgaagtagagtagtgagcaagggtgatgatatctcctttgctgagatagagtcgagttgtcctctgcctccacctccgatctcatcggatcatcggcttgctccggccgggccacattgcctaatttcagccagaacgcataacgtgccgtgtatcaaaacgcatactcaatttgcttctaccatcatacaggtcaatcatgatagtatcatgcgttctggtgactgttgatcgatcatctctttgcgccgagaaatgttcaagatgtagattaccgttctgtaagttataatcccctctgcctgtactcacaaggccaacccactcacaaatcacctcttcgttttcgtaactcaagaattttagttcatcggaccatgtcaggcaaaagcaatatcctttttacggacaagttccaggtcaaggtgagcgattcgtcaaaccggatatgtctggaatttttggctagcacgctaaatcgacagtctgcgatccttcatggatgctctgtcaggaaatcgacaaggatggcaaaaagtttgaccgagtctctcgtatgacttcaaatcctactcagcgggacctctctatgacgctcgattacgccaacgaattcatccaattcaagcctcaagaatacttcaccatgacgctggctacttcgttacacgaggatggtgatgatgaggaggtaacaggagccccgggtggtatgggcggaccagaagagactagcaagaaggtcgccaagcgagaaatgtggagaggaggtgaagaaggcctcgcggagcaatacgaatacgtcatgcatggcaaggtaagtctataggcggctcgatggtctttgtgttccgcccagagacctgagcgtgttcctgacgagaacttcttcgtgcccgcagatctacaagttcgacgagacgagaagtggagaaaactcgacgtaagtcgcagctcatagagcctcctcgccagagacactggctaactttgttacgactcactctaatccgataactctggcagaaccgcatacctttcttttgggggattgctcatggccctgagaggcaactaccgacatttgcaagagctagtcatcggagagaatgtgtatcttctcatcaagcattagacgaccggaccccgatccaaccggtcggccctcgcgactgccttgatgacaattgtacaaatccagcaacgacacacctagataggcaagacacgacataatggccgcgactgctcttcttcccattcattgccctcgattgataagcctgcgatggagggatgagtctcgcgtacggttgcctagccggaggtgtgctggtcgtcagtctgaccgttctgtaaccgggatcgacgaagtgacagcctgggctccgaacttttgttgtgccgtaggtgtttcttcaggatggcaagcacagcgtgtattagctggatcatctagagttctcccaacctctcacgtcagacgcaggtgatcgacggagacaatcgaatcaagagtctagtcccctttacaaatgatcgctatggacagtaagcctacattatgctcctgcctactcctacttcgtgtttcgatcagagccttgccgcaaatcgctcggactcaatcgccggttgaggatgacggaataatgcacgagtagcgcgaagttcagtacttcttgtctgtacggcccatcggttgagctttgtttctcgacggcgaaagagatggtgagccatgatcgcgatcacagagttgggcccctgtacctagtagacacaaatacgcctcgcaaaggggcctacactgaccggattagcccaggtaatcttaggagggaacccgcaggaaccccgcaggagccatcgcccggtcccttttgttcttagcattggccgacaaatgtatcgatacgctcatttcgtctgactgcaaattcttcaaattggtcagaaatttttggaccagcgttttttcttgctgtaaacgctggtctgagtgtcgttccagccacatgtggtacgaatacaaaagcctcgacatcttagacatttgattggtatcactgtccctgttactggtacaggcagaagcggtaagcgcccatccattgtgatatggatcgaccgtcgcaacggatgtagcatgccagcgactggcaaactcgcgcttcttgatatctattcaccccagctgccgaactcctgtccttgaggaaaggagttccttgagagctggcaatgcggcggcagtcttgcaagtcccctattcagatgttggaaccgcggctcctctgatctcgtcacgattccttgttagtttccagcagagctaatcgcactcgcctgatagcgatgaaccatatcatcatactggactgagcatagctgatatcgatccatctgtatgtaaaacgagacgccaactcaactagcgaagcaatggcttgaattgctccaagattggttagatagaccgtctcctatcttgaaactcgcaaatcccagcttgattcgaaggaaataaccttgatggtaaagcgcaagcctttgaagcaagagggcagaccggtggctgttgcagctcctgttgaccagtaatgattatgcgcaggccattggcctcgaattgcatctgcccatcatcatctttcgccagcgacaccattagcattttaaggtatggcccataggattgaagagctttgcaaccctcataaacggcttagaaagcgcaatcgcaagcatacgtgtactaaatgcactggctagttgccaaaacacgtctcagacccttagccgctgcaacacgtgtattcctgctgtggtgtataatctgaggacatgcgattgcgtaacaaagtttgggccagcgaaacaccaaggctgcaatgttgtcctttactgaaactgagtgtgactattggccaagttcatcgatcagtctgctcagctatgctcattggccatgtagtcatgagtcacagtacaaattgacttgactaagccatgcgcggcaactattgatcaagctggaaatcttccacgttgtcgttgtctctgtgaggacaagattgtaattggggatggcttttgtaattttgccatggtgtggacaggcaccatagccaggagaacttgatttccacgtgctaaacaaggaagcgcttaaagttctgtcactggagatacaagtaaattatcgtgatgtatagtgcaggatatatatctcgcccgtgaaagaagtgaaatttgtgagctattctttaagcagtcctggacagaaacagaatgggagggcagacgtcaaaagagccacggtggaatcacaagatgtaattcgctaaacacaggatccattacgcatttacagtttgacatacctcaagaaagagcaatcctcacttgcattgcctgggttttgagaaatgtgcaatcagcaattttggaacataacaataggtgatcatgctaaaaagattctgtatgaaatgttgatcaccgcattttttatcgtgattctatagcggggtctccactcacctgcatagagcacttgccacatgcatatgtgtatgaaacacctatctgagcgcctgttctgagcatgaaatgactggtgaacagcttcgattgctgactgctgtcgtagcagtaaccttgtccgtcttccaggtaaaactggagtctagcttcatacaagcactattatcatgtcgtcgttatcacccacccgtgtatctggttcagctactattcatccagagtatcgattacaatatattttgatctaacacccaagtactccacttacaacctgtacctcagatttcccgacaagaaatgtataacggatgcagtgatagcctatcggtctaacgatctcgaacaatactcactggtgacctatgtgtctggtctccctctaaggacatgtacttgtgcatctgtcttgtggtggtcccgttgaatggtcttgcctatccatctatggcgacacctgcagatgtgggtgtggaacaaacaaaaaacaagtcacaatcccacactcagaaactttgctgtcctatgaccctctttgagacatttctataagaacggctacaactgtaatgactacgtctaaggtgatatacatagccgcaaccaagtctattaagaagcgatatggctcaaccaagagatcatggaaatataacatatctctgacactgtcgtccttaatgcaatccggcactcaagttaccagattggctgacaatccctggagagcacaagtggacgaagcgtcttagcgcttgctaccattgtactcgtgagattttaatagtaaccaataaattggggatcaacgcattggtaccctgggtctagtgggtaattgtggtggaaggtcccattgaaagggtcgctggagaggtagcaagaactggaggaaggcaagcggttatagtaatgaatttgacattccaagcagcaaccttatgacgcctataagacgaagacagcgatttctggctgttgcgtttgtagccgagatctgatagccactctaagaccaggatatgacccgacccaatcgagtacttctcaggtgagaccataagcttgttgttgctgcaccgcagaaagacagatggaccagtccgtgttgtgtgtttagggttggtcctgccatgatctctccaagaattcaggaactagacggcagtcggacagcttgcattgtcagcagtgtaaaaaagccatgaaaaagagttgtcaccctgaatatgcaggggaacaacgttttgtcttgggaaaggagcttgtccctgtcaagtgttgccgttcaatgttacattgctgtccgtggatcgctcctgcactgaatttaccatgttgggtcgccacggggagacttacattcaggaactttacgatccaggacctttgtcgcacattgctggtgaaggaaatacaagattatgttacgttgctgcgaacgacggggctgagaacagagatccccaatgattacggtcacagcgttctctcttcccgttttttctccaccaatcttcccaaacatggtaggacttctgtcatttaagacagactgtgccttgggatatttccttgggggccaagatgaaaccggttttgacaccaattgaggtggcaccggtcttgttgattttaggaccgatcttggaaccagtcgagacaaactgcaacggggctgttcttctagacgttcttgaaaagatcgtgtatgacactaaccgggggctggcgccattcaggttaatgggtgatatgcgcacacactattaggatcatgtttccagagtgttaccctggaccactattgaggttcgtgtgataaatcccaaggggaagtccttgaagtggtctcataccagacacataatcctagggaagaacactcaattatgtagattaatgtagtagggtgggcgctgcattgatcatgcaatcctaggtaggcatcctaagcaccaagtcttgagcgcagcgcacaggcattagctaaaacctattgctagcaggaatatgtggtatgcatagattaaggtagtagattagtgctgtggacatgacacaaccaaagggagaaatcctaaggtgctgctatagtgattcacacgttctgtgtagaacatccatgaatcatgcttgtggagaactttcctggggcactcctttggagaaccctgtcagaggagatcaggaagatatattcagtatactatcttctaccttatatcattggagttctctatctgtcatcaatgtatctaactttaccctactgttgtacctcaccttcagaaaatgcttccaaaggctatcctcaaaatggtttcaccttggacctccttgacccttaagaggtacagaaactttatgtggagtgctgaggggtcagacagagcttagcctcaaatctacgactccttgacagtgaagcacaaagggattcttaggagcatccacagggaggaagactcgactgtatgataacgattggggcgggaactttcacagggacgattggactggacacgtagaatttcagaggaatatcccatgtacgccaagcagagtagtagacagtgtagtagtacagtgttgcactgttggacgtcagacaccctaggtgtaagtcccacatagtttgcctagtcgtcagcaagacgaattcgtgatataaaatatttacatgtccaccaacctttgtcatcctgaatgattgagaaaccacaagcaatgctgccttcctggggaatcttcaacaacggcctatgtggtagtccgttcttatatgtcactgcatctgctactgtaatgcacttcttgcttgcttccgtctgtcttgctcattacggaccaacccagagccagctgacccagagaaccagtgtcgtcattgtcattagtatcgatgtcctcatacaatcggtattcaagagcatcatcgcactataatcagtgaattaagtggcgttgctgagttcattctgcctttacacaacttactactgatttctggtcctcgataactacaggtacagttatcgtcggacaactctggatatatccatactgtagctctgccttgctaaattactgtggcgtgtccagtcgagggattcttcctttataaatgtgggatttgtacatgatacaccgtagatagtgccaacggcattacagtactcttgagtcttggggttggtgtcacgtgactctagacgcgcgcgccctctagtactaggtacttagaggggtaaaacacttagacatatattcatctctctttcttacatacctattgaacttcatcaatctaattgcatgttgttcaataggtaagttattgacattgtacaacttaatgataaatcaatctaattgcatgttgttcaatagttggtatcataaccgtggtgcccttcaaaacatctcccttctagaaagtccgtttaaagtaaccctcggtaaccaggttcaaagaagcgctcccactgacaggagcaacatcacttgtaggtattttacctaggcggatcgcatgccaatgaccgttgtataatgtcaagaggctccagtccacatttgtcatgcgggaatctcagggcaaaaaagggtgaggcagagctgttcataatatccctatgacacctcttgtagaatgtaccattttgtcctccaactgggccctcctcccaggacctactcactatccagttgaaccgtgcgggtcctgccaaagctttgttcatcgtgtgacgagcctctcttgcagccttcaatctccatggtatggccatcttgagacccctagccagatgcaggtaagcgacaatgttacacggtgtgattgtttcatgatggaggtgattgatgataaccaaacctgtagtcattcaagtcagcagcaacctgcgctaaggcagaagaactccagcaatagaatttggttgaccaattgttttcgtctgatcatgagatagatatctgacaaggataggcttaatggccatcatgacccagtgtcaattctcagactatctgtgctctgccttttgcactattggcttagttgtttgctcctgcttgttacacgcttttgcgcctaattggttcattaaaccagcacatccatcgcctctttgaagtcctgcttgctcccttgacttgctaaaatcaaccaatcacatcatcctgctctattgcaaataccccactaagagataagagacaagacccttcgataagcctcacctccaacctttctccaaaatcccttggcatagatataaattcccagatcacatatgtctgcatgtcgtcatagaatgttattgttaccgctcaggctgtaggcaacggctcaccctgagggtcgcgtcacgtgacgcgccggaggagttgtccaaaaaagacgccccaagtgaaagtccgtctgctgacgttctactgtactacgatgctaaggatgccttaggcatccgttattacttatacacaatgacccctaccttcgcccctctcccacttactgccccagtggaaccttccgatggaaccctccaccctaacaattacttctttctgaaatctgctgacaagtcttatactatatgtttagttccttgcctgacagcttgtcactctacctcaacaatgttgtctggctagcctacaggcagatttcaccaagcaatctgcttatcaagtcaactgcttcctctttgcctttcctgtcaattgcttgtccctcttaaactctcttttgtccactcggtccttctcatcggcaacaattgccgctgttacagggtatgacaaatcgggttgtaaagatgcgactgtgatcacgcatttatgaccacaatcacatcttgcaactcctgtcacactattgcgactcctgtcacagaactgcaactgcaatcacacatttgcgacccggtcacatattcgtgactactctagtcacaactcttgtacacacaccactagccccttggtgtatatataggagtccccagaaggaggaaaggcatcccttttctcttctcttatgggaattgagacctcttgacaccagattcaatacttttacctttatccccttcttcacctttcacctttgactttcctcaacaaagcttagctacccttgttgcatatttaacaaagacatcaagaaccttagacttagtgttgagacaactgcaagacggacatcattagctgtaagagcaccttttctctccctgggatctggtatcgttacacgggtatccttgccgcaaagggccaagttcacgcgatcttgagagctgcagtgaaggcactgcaaaccccaagggggctgcttctgcaatacatgagcaatcatagccatagagacttctcgcagagtagagtcatacaccttgtgtctgcgtactcattcactgtattacatactccagacgtaaacacacctatttatacatgcgctactcttaccaatcccggagaataccctgtactgctggcagccaaaactattgagatgcctgtgctattggaaatttgtgtctggcaacatacttgcctggcaaatcgaatcagagtgtcaattagccaagttgggtggaagtttgcatagagcaaatttggagagcacattggtggtggggtcacaaatttgcgcttcctcactaggatctgcagtacctcatgcattcaaatttattgtacgtctaccttgaaccttaacgccaggatctatctgctgtagtcacgtcggtcagcagaaagataagcttcgaaactgctccataacgtttgcagagtgtttcaagatgacaagtagttgaatagggtataaggctgtaacataagatatctaagaggttgctctgaaagttgtgccttaagcataattgacggtgtgtgagatggctatagtagtccctgcatatctttctgtcacctgctgaaaactctgtaccaaatccggcagacgcgtactgtatcagagcccccttgcaaatcacccgtgacatggccctacccagaatcctcatctgaccagtcgaaaactctctgggaggtgtcattgttcgggcactcattgtattctgcaaaaagctcccgaggattaccaggctgcagtaccacatagaacactcagagaggaataccatgtgacatatctcaatggggaagttccttaaccagtcacagagaacataagaggaagatatcccatatgcatagatcgatataggaggtgagtatgcatctgttagacattgctaggtaggattactgaagtgccgatcaagtgtgaagatctcatgattgagacaaggcctaatacaacccgataggatatcttcagcccagtctagcacatggcaagcaaatacttgtctatcgtcttctttgtcatactgatgttcgagggatcctgcatgcttggcttttgttggtacttcattgctgttggacagaacgactacagagtataaatcaaagttatgcagtctagttagcaagtcaatatacggatacccaagggtcataaggcattacaaatctaggcactcatcaagccttgtgatgtgggtccagggaccaatgttgataaccgtgtattgcagatactgagcctgtcacaaccaccggtgccactgtaaccttgtctttgaggacaagtttgtgtggcagtatctgtgaagcaagacgttatacaatcaggttgtcggtgacaccctcaagaagaacgaacttgtgaagtgaccatatttctggcgcagacttatcagaagcttgtcagaagctgtacaatatgttgcatgcccttgacaatccatccctcaattttcgcaatctggcttccatttcaaccagacattatcaaaggggcccctcttgtctccaaccgcccaattgattacgccgaaggtcatatttctgagttcgccatcctagatctgatgaaatggcagccacgtcgctaaggtttgcatcgatgcatgtacaaggcaaatctgatgacattatttgaaacaggtaatctgaggacaagcgcctggattatcaactttagcaaaattttcaaaatttcatgcgtaattatcatatgaagacatcagatctgccttgttacaagagatgaattgaatgaggtcagaaataccagcaatcaggtgtacagtactgcataccactgcaacaaataggtgtacatgctgccttgttgtgtgtacaccttttgcgttttcagtagacatcccctcaggttactattgagatctgttgccttatctagctgtcgtatagcatatctgaaccgcttgtgacttgtcaatgacatagtgatcacttgcctgatggtatcaaactgctatatgtaatgaatattggatgagagtaaaccatgcctctgtactcagacctgcaatattcaggcagacaagctgctatctccattctgcaacctgcaatgatcagagatacagccaaggcccctgtgactagtcctatggcaactaaatggcaatctctatttgccacccatgtctttgcccttgctggtcaaaccgattgacatggtgacagtgccatgagtgtgaacttgactgcaccaacacgattgtcaggaaagctagtgattgctacaggcaatgtagcaagaacaaagccccctgcaacatgttcaaagcataccccaaaggcttccgctccattgtgattgctccattttacaacatcatgacgtcaaggtgactaactatcctccagtttgacctgattacaagcgccgttgccgacctagtactgccgcaaatcataaaataagttaggagacgattcccagaccagtaattcacacgattgagcctgtcacgtgactcgacgagcgcgcgagcgcgagacgcaccctacatctacaagtacatcagaactacttacaaactatcatagtatcagttcctattgtttccctagtgatttctatgggaaacaataggtatgttaccttcatcggttttgtagtagtttcaacgtacttatcctagtgatttctatgggaaacagaagagccaactccactgaagttcccactaccaagcattccttctacaggaatcagagtccaacttgaagctggaggtccttcttcattagctttttgattgacaattgtaatatatgatcacattccggtagcccactcaactgttatgcgcaattgccttatgagtggcaatattgcctgcaagacggtcttcgtgctcatttcagtcgcaccaaagatccaatgggccaagcttttatcgagggaagtcaatttctgacaactaatctgtccagttcttgtacctatctaatacttctcctatgacaagcaaacgacttgctatcttgttaaattccaaaggggaattggcaagggtagctaagccttgaaggtactggtaaaggtgattggtgtgagtatagtgtgcaggtgactctgtgcgcataaagattttgaggtaggggatgggactaggtagtgagataaatgaggagtaaaagaggcagagtagcgtactctgatccgcttcatcctgcctcctgacttctgactttgctcacaattaggttagatgtatatgcaaagacaagggatatgtgatatgtctataatagcatatattgttcacaaggatttcctacagtcccactgtgaccgcttgggcggaagggcgctatccaaaaaccaatgcagcggaacatcttggcgtaaaatgttgattgacaagctctggcgctaggatcttgtgagcagatccttggactaacatatgttgtgctagaaaaggaataccccacgtaaagaacaagggggttagccaaagactaaccccaatgatatcgtcctccgcatcacacaccttgtgaattccccatgtggcgaggagatcgttaccgcgcattttgtacgcagcggagcgatccctggcagcatgtcttgtgatgctccacagccgatgtcagcaattctgcctgacaaacacttgagattggcctcagcagctggaagggaatcagtgcattatcgttccagtggcactaatggccagtgaacttgctgtcgacccattacaagatctccgctaaggatccatgcaggtggccatatgactcagccagtagtagattgaccatggtcagaactcatcacctccattgctggatctggcaagggcagtgattggacccaaagcggtgatgtgactttcagcgtttgtaattgtccaagcttgatttgcaatacaatagaggaagacccttacaagtaccttctcatcagacatccgccggatccaccctcggttgcacaacttgaccatattacattgtggctatgcagatgttgaggatcttgacctttcaaaccccactgatattgtgaaccagagttgatgcctgagagacaccccaagtgagagtgttagggttaggcctctgctaactccttgttactccatgcaggacttgcaccgtagatctcctacctaggattgtataacggatgcagtactagttctactacagcagtctacactatgggatatgcccctctagtgttctatgtgcctggtacaaggtcctttctgagggattgtcctcggagtctgtcgcgtgaccccaccaaggagtactctgaggtagcgtccgccatgatatgttgtggtaggtatccgcggttgcgacctattaaactgaacggtaacagagagtctatttgttggcattctattgtgctacgatgttacggatgcattaggttcctgttgttgcttatatacaatgacaactgcctttgctcctctcctgcttacttctctggtgcagcctcttgcaaagcgacaacagaaggaactggaggactcacttgagacgcactacaggttgatgccggcggagttctaaaaccggttggtgttcaatctcgccttgatgagaggcatgtacatggcaggcaacatgctctttgacacaagccaggaccaatcacagacaggcggtccgcagatggttgccaacgccatcacgatgaggggtgccaaagggaaattagactggtggactctatagctggaccaggtctgcagctgtggtgagtacgcatgggtgaaagcaagtcttcaacagagtgcatgtcgatcttggtctgatgtgtcgacccctattcttcctcaggcggagagcttatgacctcgctatgacattgttagggtggagggttccatcggaaggttccactggggcagtaagtgggagaggggcaaaggtaggggtcattgtgtataagtaataacggatgcctaaggcatccttagcatcgtagtacagtagaacgtcagcagacggactttcacttggggcgtcttcttggacaactcctccggcgcgtcacgtgacgcgaccctcggggtgagccgttgcctacagcctgagcggtgacagacatcacccccaatggaatttgaagcggatagccgagagcaaaaccgccagctcctgacacagtgtgtctgataatgtttaggccttgagatgcagccccaagctagcacattgacctgagcatgcaggttatccctctctaacattctatttgtcaggtctgtccacctcctcatggaagcgtgtcgtcacctcaccaaggaagtcttgtctcagacttgatgttataaatatatattggacaaagtaaaaattggacacctcagtggtgtagtggtaacattattccttcccaaggaatagcactgggttcgattcccagctgtggtatttcttttttgccgcactgcagtggattttcgtactctatgccactttcgctactcgtccacgcgctcatgttcgatgtgtcttgcgttttcaattgctttgtatacgtcgagatacagtgcgtacaaggcggttcacgtgttcaacaccctctagagcagtatccgccattcccaaggttgcagccccagcaactcgctgcgccctggccactacctgccagggccagtccgacgatactgatcaccccctcgccaaggaccaatccactggcggcgacaataacgatcaggggagtctctccattgcgccttgtacgcaaggcgatgataccgccaatgagtctggccaaggagaaacttggcacgttcagaaatccgatcgctgaaagcaaatacgcagggttcagctttcaagcaagtgtaacgagcggcaagcaggcgcatccgatttaccgaacgctattccagaaggtaaataggcgacgaatctcggtgtcgcacgtcgggtcagcagcggcagaacgtatctcatgctcgagatcaccgcaaagacgaatccaaaggccatcatgaaatcggcagccctgtggggcagatgtccagtattgagtaacctggcaaggttgagcctgcgtcgctctgttcgtcagcgctgcagaagggcgataatagcggcaacatagctcgtgctcaccagatcgcggccgtcggaacctggaattcagggccgggaatctgtacacagagcaggcattcgtgagcagaacgaacgaatgcgctggaggacatgaatctggaccaacgactcacctcgtatatgcgcgtgtagagtttgtatgcaccgaccgagacgaagacacttgcgaaactgccaatcatctgcccataaaactgcgatctcggagaggctttcaggagtgatccggtcttgagatcttgcatgagatcaccagctctaacagagggcacgataagtaggatgtcatggcatggaaacggccatcactcactgctgagcaccagcctgccaacacacgaggaaggtagagtgttagcttgtggcctacagcaggaatggtcggttgcgtacctcggcgacgccaccggcgatgatattggccaccacgttaccgggttgcaacacggcgaataacagctggctgatcttgccgataccggaaaccggattcaggtcggtttccccgagggccctgacgcctagcagactaagaattgatgctagaactaggcccactgcagttgcccaaggtttaataccatcggtaccaaaaatccaccagaccagggtgatccccatgacagatgacaagaccagaccgacgatgacccagctgtcgggaaccaatcgatgcggcggttcagaatccacgtcgtcctcatccctgagaggttcgatgtttaataccgattcgaacgtcctttgtgacgactttgccgagtgtgaaccggaatgtgaaccgtaccgtgcatgcagaccgcggctgaagttcacgattaccggaataagcgagatgacggactcggagatcataatcgctaaagacacccagagctaatgtgtggatctcctgtcagccatcaggtgctgcgagggcgtatgcgaggtcttacaatccatccccgagatccattggtagatgacgatacggggccaggggcccagccgttcaatttggctattggtgacagtattgcccatccagttaccatacccaggttcatagaaaccgtggtagggaatcccatgataatcccctggcccacgtaagagagcgatggggtgaacctgaatgcgtccgactttagtctcgactgcctgtcctgccccaagcgctaccctcaccaccacaaccatgctgatgccagactcgtgttgaaaaagatccccaacacgtcaaagaccgggatggcatgtacgactgggaaccagaagcttaacagctaaagtagcctcgccctcggtgagcagactgtgctacaccatccggactgtgacactcctccttaccgtgacgaagccgctcgcagcaaaacaggacccaagtacataccatcccttccttcccatctcttccctctcgacagagcgtttgctcatgtcgtccgcaggggttgcgaatgagcccctatcaccgtcgagatcgtccagcgatgatgaccggtgttcagcgaaggtcgggagtggctgatatccactcaaatctgaggatgtcacctgagcaattcgaggcacagggacttgtggaggcggaagcttgtggagcagtgcaatgagctgtgcggtggcagctatgattcggcgagcttgtgcgtttgagcatactgtataggcagtccttggacacgggaccaggacttactgccagaagggaacaccagcttctccttgacaatctgatataatgccaatataagcaccaccgccggcctggtagaataatcattccgaccggcacacaatcgacttacaacttgtttgcgtaacggcaccgcgagaaagacactggcagggcggcaacgtcatccaaaaacttagcaaagcggcatgacgatccacagacagagtgtgagactgacccaaagaagcatatcccaatgctccagccgataagctgccagaaactcaatttcattgggcccacgccgtccagagtgaagtctagctgttccagagccggaatgataccgaccagcccggcagccaacggcagagtgccggttgcgacagcggtcgtctgaacaacgacattctcctgggcagtgaacggtcgtttcgaaggcgagaggaagtgggggattggcaatttgaagatggcaaaaccaagaagggacgattgcaaagacatcatggatatccatcccgattgcaggccctacatggcggtacttgaatatgagccacgttgataaggtatcacacaacgagacgtacgaagtataggtttgtgaaagccagtctaagagccgagtctattcgtcagtatttcgtcactccaggcgcatgggccaggtccgggcaatgatgacgtacagaactcctaccagcagtcctaccacaacggctcgaacctagtcacagaacggagatgaggatgaacgaggatcaggcatgacgtgcacggactggaaccaaccgtgaagtcgccttcatactcgatctcttcaccgtagtcttcgccatggtcggtctcagcgcccaacagaggttgctggagcctgtctggtgctgccatgatctttcctttctacaggaagagatggtctagtcttggagtacgtgaggaggcgtatgttgctggcgaggtctatataagtagttcattcaactcggcaattgagtatacatgaagatctgtacatctgcgacctttcagattgcaggctgtatcgtgatatcgtcgtgaggaagaacctcttgatgctcaactgagaaatcgagagacggccaaagccggattatggcggataaatcacattcgcacatgcggtgcgtgatcgagcgatcgcgcagcttgtattagtcatacagtgtacagtccgatgccagacaggcgagacaactatgcctcgtctgcattcgccatcgagaatcaaacctcaatttatgtacccgtgcatacgctgtaccgatatgcaagctctcagtccatttgcacctgcgtactttgagggatgtcaaggggccatgtatataagcaggaggagttgtctatatcatggtcatgggcaatcgtccgtatcaactcgcgggaatacgatactacatgatgttcgtggtgtctgaattgtagtgaaaagtctagagggctccgctgaagggtactgaagagggcgttagatcaaggacatgacggaagataaggggaaggacgatcaaggcgatcaggattccctgcacaagagcgtagacgatcgagtctgccgaggtagggtagcgggttagcagcaatcactgacgcttaaagtctgctcgtgacttacatttggctacaatcttgcgtcgttggcttcgctgcctgaaagagtagatgggaggtcgaatctgacgactcgctgttatatgcaggacaagggaaatcagtttacttgatcggcgagccagctgctgaatgatcacttacgtcgcagccagaagagcatggtcgaatgcaaacggtcaaagtagggaatcaaggtaggaggagtcaagaccagcaacagtgctatcacatgcaaggaatgccggtgagtggaaagtactcaagctgcgcgcggcaggccgccaacaagactcaccatgacaactcaagaagtccgcagagtagagacccatctcgatgaccttgacgataaactctcgagcaggttggctaagcacgtgagaacctagacctctgttgaaccagacaccctgttcgacgataatatcattgtcagtcaagcatcgccctgaccagagagatcatgtaactcacagtccaccaggctcggttggtctcgtcgtgcttgaactcgcgagacaggaacaccgcaatcaagatcttgaagatgcaacgctgcaccataatcacagcgatgactccaagaacggcatgcgaggtgttccacagctcgaggaaccactgacaagcaggacgcgtgttcagttcaaacgctcgtgtcttcagctcatttctagtcactcacgaggaattcgaagaatgcgcaaagtccgacaacggcaccgaagtgagcgagcgcggccatgacggctccgaattggttggtatatccgttgagctgtagtagagcgggaaatttcagtttgaagctgtatcatgtcacgggtcaaagctactaacgcaaggtcccaggaacagactgatcaagaagaggacgatcaacaacgccatgttgaagacaatcggccccaaactaatgacagcgatacgcagaagaccgggttgataggcaccctcaacagggaatgacttgacgaagaggtaggcgacaacaaagatgatcgccagagccaaaggagcaaggatctcggacagcagaatagctctccaaggtgcacgaggaacatcgctcgacaacttttccgagggcaatccgagacgcttcctcttgaaaccagtgatacgggttcgcgatagacggcagtatccgacccaagagttggcgtgcgttctcgagttccctcgagacatccagcggaggagttcgcggtagtcaatgataaagtcgctaaaggagaactggtgcgggttgaagaggaaaggtgcgatggcgagcgacagcacagtaatccagaagtagatcaagtacggcgtccacaaggtcaaggtgatatagagcaacaagaccagggtacggagtccaaggtagatcgagggtccggcgaatcgcgagtacaagatgctaaacgagatccgggtcgtggcgaatcctcgtccggttgcaatgtatcgggctcctccgaagttcagatcgttcaagatcgagtgcgtgtagatttgggtggagaacacctcgaatacaggcgacagcgacatgaagtgcttggccaatctgataatggcacggcctgcgccacgttccgtcaactcttgcaagaagagtggcaagaaggcgatgaagaagacgatgaaaaccgcgatgatgcatcgctcaatccactggtaaacggggaccaagttgtagcaaccggattgtccgggtcgaatctctccgttcgagttgtaccgacagatgaacagttccttgttcatcgtacccaagaaggtcagaacgaccatgaacacttgaaccgagaggataaccaagatgttgttgatgtggaatccaggatgaccgtagtagaatgtaaggaacctatcgataggcagctgcgttcccaagtagtagtactctcgactgagcatttgctctcccataccagttccaatcttggtctggaaattgagaatggtaccgaaacccagatcacgacctttaccacattggtagtattccgaatgcttgatccttccgccccgtccaaacgcgttcataccggcgtagatatcctcgttcaagtgcaaacccttctgagccttggagacaccgcctcgagtgttcatgtagatggcgttcaagaaatccgggtgaccatagtgcaactttccaccaatccacgagagcgaacgagcagccaaggttccgaaagtctgttcctttccggcagcaatgtctccgaggataccaatgttctctgagaaaatatactctcgcgctcccaagatggcgacaggcggtttggagaaggcagcgctgccccactgggtgtacgggctttggctggaaacgttgaactcttcaaactcggcgagcacattacggatcttgagacactcctcgaggtagttgtcctggttcgcgtcaatcaactgcaagtactctcctcggtagaagacgatggcgtggttctggttgtccgatttcccatctcccaggattgggttaccaggcaattcaatcctaaacttcggtcgcctgcgtccgttgggcaagacctcggagtgtccgtcgatcagagcggagaagatcctcggctcaccaccttcctttcgaggaggttcctcgtcgaggtaggcgatttgcaagtcgggataggcgcgcaagagaaactcggcgttctcatgctcttccttgttgaacttggagtaccgttgcatggaaacaacgaatttaaacttgcggcgagacatcctttcgagttcacgctcgagtttgtcggtgtttcctccaaagagctggacaacttcggggttctcgactcggtacaagagcttgatcgccttcgagtagttcatgaatccagagaccgttcggtagagagtctgcgcacgaagcgaggcccagatacgggttcgcagggtgtactctggggcggcagacttgaaaccgacagtgtagaaggggatatcatctgtcctcttcgagtcgcctttttcgtcagagccgccaccgaaggggttctgtccggagaacatggtggattcttctgccaagatcttggtgtccttgacgaagttgtcccattcaatgggatgaagctgcttcaggtattccaaaagggtgacacgcgtgttttggtcttcttctcgaatgatctccctgagtgacagcaagatcttttccgagtaatgggggaccaagacggtgaatgtgggcatggcgtcgatgggcaaaggttcaggtagggcggtagtgagggattgcgaaaagaacgagattcgcctctcggcctcgcttccgtgcgggaaaaattcgatgttagacgcgctcttctctccctgggcgatgaagaaggcaggagcacggagagtcctcttgccctcgttgtcagaaggaacctggtgataaagcaatttctgcacgtggtcgatggacagcaaatgctcccgatacatcgaaatgatgatggcgttccagacctgagagaccaaaactttgggcttgtacttgacctccatgtcgttggtagccagcagcttggcgtagattcgcttgggcaacctcataaagatgtccttccaaggcgtccagatgctcatgccgagagcaaacgatcgagcgatactgaagaccgtattccagatgacataccagaggaaggtgtcgaggaagaagaggatcagatccatgacgaacatgatcgacagcgtaaaagcggcctggttgcggcagagaccaccgccaaacaccttgtcgttgcaattctgtactttcatgccgaccatgaccctgataggatcacggaacgacaaggtcaagaagaagtaactctccgtaagcttgagaccaaagacgaggacccagagcatgatagaggcagctcgggaactcttctcgagcttggggtacgaggcggtaaacgtctggttggccagatactttcggttcttgccagcgactcgatctccaaacatccggcccgagggaatgatggtgaacatgacgaccgaggcgatggccaggccgaactggacgatacttatgatgagcgagacttgcgagttttgatcgaaaaaggcgatgtagatggatggtccaccggtaatggccaggatgatcagcaagaagatcaaccgcctcgtcaagtgcgaagtgttattccaagtggtcgggatgtacgagaattcggcgagggtggcggcgatcatgatcaacgaggcgacagcaccacccaacgcggtcatcgagaacgacatgggtttagtggcggtggtagagttcctgggcgagtatacggtaggagcgttccaggcactgtatttgggcaagcagtacgacttagttggcataccccgggatggacaaatgatggcagacgcgagactgacgtatagaaccagaaagtcgagatgtgtaagacccagattcggttgaagtttacgagaaggtggacagcgcttcgtttctccaagtaagtcttgaagaaggctttgctccagtcgaccttgtcgagcttcatgaacctttgagctggggggatatcgatcaatcgggtctgcgttcatgcaagacatgtctgcagtgagcaacgtgtctgagtgaagcgatcgtagcagactgggcttcaccttgtcagccaattggatcctggcgattccttcggggtaccagaacaactggttgacatcgtcgtaaccgatgatctcgtggtgatccctctccctcctgaggaatttgccgtcgacgacctcgtaaccttggtcccgcaggaacctatacaaaggcttgacaacgctcctcaagtaaaggccttcgggaacgggttcgatcctgttctggcactcggggcttcggtagtagtcgtcggcgcacttgaagatgaaacagagacactcaggggtgaacctgacctgggcggcctcaccccaacacaagaggaacagggcgacctgcctcaacctgtcgtattgcgacatgttgttcattgcggtcctccacctggaaacggccgagtcgagcgatttggccgaagcggtgatgggtttctttttgcttcggaccgatttgacacgggcgagacctgggttttgggcagcaccgatggcatcgtcgaggtcgagctgagcggcaaagtaccatttacggtagttggcgtgctctcctccgatgtagtcggcgtgaagagtcaacaacgcctggtcgggagacattcgagaggctcgcgagtcgagctgaatcatcagaaagtcgaagatgtttcgcgaagagtctattttcgagggatggttacatcgggatcagcctcagctattatctttctgaatagctatgcctcgaactgacctttttggaaaccgaacttgttggccaaatcgatcaaaacgtcttcaatctcttccttggaaagaggaatgttcgcctcttgggtccaagccggctgtcagggaaagcatgcgatggggtcaggcctctgctcaacggcccgcgacggattgatgttctcacataaggctctcgtccgcgatgacctccattactgccctcggtatacgtgggggtgctagaacgcgaagggtagtaacctggttgcgcaccgggttgctggtctggagatccaaatcaaagaagatcagaaatccatcgaggcactgccaagctgagacaacatacactcgccactgtagccgctctcgctagcccaggtctcccggccgacaccaccaccttcgtaacgctccttcatctctcggtcggcgtcatagtagcccccttgctggggattggcggggatcggctgagacggaagtccaccggggcctggttgaggctggttgtggtaagggtagttgccccccgcaccagggttttggaaaggatcttggggccgggacatctaatcacggaagacggaaggtgatgaacggaaattagcctgctgcactaggatatcgcgagccgtcacacaggcatcgtgcattttgcaagcgatgcacgcgtgatgtcaatcatcgcgaattcaaggatgctcacgattggctgtcacctagatctgttcaatcgtgaggtcgtaaacggcaagattggcctcgagaccgtctatcgtgaagttgatggtgttgatcctccgttataaggtatttccgtagaagaggagtgaagtgtgaatgattcgtgaaaagggaaaagggaagtaaatcaagcaaatgtaaacgagagtgagggcttcgttcccttgtaataatgcgtgtcgtgctgatgagcggcggagaagatcaaaagtcgtagcgattcaagtcgtaggttgcaggagagtaccagcaggtctccagatgaccaggagggaatagctgtcgatcggtggtgggtataccgatggaaggagtcgaggggggtcgtgatgaaagccgttgaacgcggggcgaagggcgattccttgctcgtcctttgttattgttgccgtcgccgtacggatcagccactttacacttgcacttctgcttgacgtcgagtgcgagagtgtgcaggtgaaagactcgaaggtgtcccgaaatgtaggtcgatgaggcaaataattgtgatcaagcaaagtacagagcgagagagacgtcggcaagggccaagggacgtgtatgggtggttgtgggtggatgggtgggtggtgtgtgtgaacgtacgtgccggtcgctgctgtgccgctcgtgatggcagcgtgagatgtgtataagggacggggggggggcatgggcgagacggagagagagcgggaggacgacggattgtgattggggcagagagggagaggtagagaaggggggtcacagcggaagcaaatatctgtgtgtaagctctctctcggtgtcatcgtgcttctgccatcagccagctgccagctcatcgccccggaccgagattcctaatcaaaacaaccgcaatcacgacacgaccagctttgcccacccccgcgacctttcccaccgtctctccgtcgataacctcgagacccgggctcggtccgtgagatacgagagtacggaacatcaacccggatcagccgggtccaagctgcaaaggagatctttttcgataacaacagaacatcgcttgatgatgatcgcaaagacgtctctcacgccagccagccgagctctccttgcagctcggtctcatttgcttgcatcatcatcatacatcatgcatcgaggttgcgcgagtcgtacagacgcatcattcctgcgatgaatcgtccgtcctggttcccatcggattctcgtgccccgtccctgccgtgacctcccgacgagcgacgccgtttcgatgtgggttcgcgtagcaaacgagccagaagcacgcgcgtgctcgagttgacgggccgatcctcgctctcgtcatcggcttcgtcgtattgctcggttccaaggccgggcacgataatcgattcgcaaaagacacgtcatgcactatcagactcctcttgcaggtacccgttcgttatcaaataattgatcctgggccgaacggcagtccatgaacatccacctcgtcgcttgtcgtcgaccgtcgctgagattggtcaaacaggtccaggccaatatgcccacccgacactctcgctgtccgacggcttgacaaaggcacggcaacatcatctccaactaacaccactcttcattccctctccgccatgcctaccgtcgaagattacaacgaagaggaagaggaacaggaccgaccgaccgagtcgttcgtgttcgacgacgataccgacctccccctccccggtacgaccccggctgctgcaccttccagctcgtcccaacgtcgagcgttacccaatacaggcacccgtggtgggatcttgtcgcatatcgatgacgacgaggtggatttcgatctagccaagctccagggtcaggggagggggatcgagaacgtcggtgcgcctccggtctctgctcggacgacctcgacggtcacccggtcgacggatgatgatgccaatcgacctgtcgcgccccaacaacaacagcaaggtgggatgggcgggatgggagggatcatgggtgatctgatgaagatccaagaggccgaggatcagaggatgagaaagttggagaaacagctcgggtcgacccggttcgtcaaggatcccgaggagttcaagaggtgagcgcgtcgatgatcagggatcagaagcaagcgcaagcgacgatacgtcgtcgtctgggaactcgtcgttgatcccatatccgaacgacgtccccttccctccctcaggtggcactcgatctaccctatctactttgatgcgaaagcgacgacgacgaccggacgtcgagtgacccgacagaaatctctctggtggccccagagtttccacatcgccaaggcatgcagttctctcggcctcgagacggtccacgaggtcagtcccgaatcgggtccactgtgatgtcacgcgaatcctgacacggcgtgatatgatacgcggaacggtcagatcgaaaagtgtcatccgagcgattggaagaatccgggtagggtcaaggtcaggttggaaaaggacggtcaacctgtgcatcgggatatcaagaaccgtgagtggcagtcgcgggtggtgttccccccgacgcagccttgtggtcatctcgacgtcgctcaccctcgctccccgccccatcacgcaggaacgcaactgtacaacctcgtcgccactcagatgcaacgacagaacgcctcgttggtctacacgaaaccagctcgacaacccagctcgtccgcctcgtcgtctaaacccaccgcgacgaccgtgaccaagcaaccctcggccggatcgaaatccagcgggaaaaagtcgatcaagacggccgctagcgtgaacaagtcgacaccccccgtcccggccggacctcgaccgcctcgaccaccccacccttacccatcgatggaagacaggttcccgctcaactcgcccctcctcgcgctcggcgtcgccgtcgaggccgtcaagcgggacgtcgagcaggaaaaggaaaacctgaaacgagggatcggtgcaccaggtgcaggcgcgggtgcggacggagagggcaaggctcagcccaagatgcccaagatgaaaaagatcatggtcagaaagaggtgattggggacgtcgagacgagcgactttgtataatcagggcggaaagagggccgttcacggtcaattgagaagacgagatgcatcgacaaatccccttgtcgagcaatctgatcatggcttccacagaaatggtcgcagtcgtttcgggctatctagtcgaaagcccaacgcctattgacggtgttcgggagatttcgattgcatagtgcatccgttacgagagacaagaatgatgtgaaacccccagcgttcgagctcggcaatgcccgcccaccgctcgatccacagtcgaccttgcgaccgtcgtttcatgccgtttccatttttccgtccgcacagcgagagagagaaagctctgagaacgtcgccgacgtcggcttagagaaagtatctatgcgcgacggtgagagcgatcagtcatacgggacgaggcggcaacgaccgggcatgtcaaaaggacgacactcaccgatcaccaaagtctccgagtccgggcacgatgaacgaatctccatcgagaccttcgtccacccaggcggtgatctacgggaagggtatcgtatcaccggcgtccgtcagccggtccagtgtctatctaatcgaatagccatgaatctgctaaaaacaagactcacaatcttgagcttggggtacttttcgcaaacgttcttgagaccttcaggggaagagatctagcagtgtcggcgataatgatcagtacggcgcttcctcgttgccatgtggaggagggggtttgcgtaccaggttcaagaacaagatcttctcctcgtgcacgccgtggctcaacaggacgtcgatcgcttgcatggcagacccgcccgtggcttaggagaatatcgcataggatgggtctagagtcagcgcctacgtttccacacaacgagggttgagggatcttgcgcagggactaaccgagcatggggtcgaggaggagacaatatcgggtatcgatgtcttcaggtagcttggcgtactacgaacgggaagaaattgcccgccgccatgtcatgtcagtcacgtggccgtgatcgtgaacaggcagacgcgggggagtcctcacaaagagcttgggtttggcagtagcttcatcctgctcgaattgcacaaggtccgatcagctctggggctcgacttcgatgaggtctcggaaagcggttcacgaaccctctggatcagaatctacggtatgagtgagacattgaatacgatcagctttcccgcaaatcgatggttgaggaaggggggctctactcgctttgcctattcgtactgttgactcgagccacgatggtgcgtccaagtcagttccccacatagtggcgtgtttcccagacctgacgagacgggatacccacctgatcgtgcacattctcgaagacccgcttccatggcctacattcccccacagaagcttcaccctttcagccctggccctggtccttgctcgacccacgacgactcacctctccagccctcatgatactgactccacagatctttccctggaaactgacccctgggtattcgatcccgagtggggtggtcaccgtatgcgagacgacgggaaggtggttcagaccttcttccacgaggagtcggatgatcctgtccgaagtgctgagccccgcgtatcacgcgtgtccccatcggtcagcctttcccgtatcaagagaggccgggatggaaagagtatgggtacgtacaagacgaattccccacgttgagtcttgacatcccggatgatggtcaagagggcttgtaattgcgccgtggccgggaggacgagggcgttagtaggcaggtttccacaggaagggtttgaacggctcatggacgacgccgggagcgtggtcgtagctgactgttgttgctgttgagatggcatggtgggtgtgatatcgtactgcgattgagctgtgagccgtttgattgagtcggtttgagtttaggaagacctcgttatctgaatcgtcttgttggactgttgcagctgtttaggaggttgccgacggatatggctcatggtgattacgtaattactcacctcatctatattgtcatgttcattcccatgctaattgtcaatttccataaacttgtcagcctcgctcgaccgagaaagatccaaacgagatgaatctgatcttatctcacaaagaccgtcagcgtcgtcctaaccataactcaccatcctgttctcaaaactccgtacaaatcgtcacctcgtcattaacacgctccttcaaagttcaaggttagcacatatcgggcacctcgcatagactctctttcctgatcagcttgactatatagacagcacttcttggcatttgcatagaccagctcggactcgaccaaccacaactttgagaacgtacacgacatgtctgactggggtaagccaatcccctgccgactctttatgctgaccctatcagcctcctgatacaactttcgtttcttttgctcatcatcagacctcagcgaagacgagactccggtagcccccaaggtggctcccgctaccaccggtacgagcaccgcacccgccatcgccccgaccccggctcccgtggcttacaagtctagacgtttcgagggcgaggacgaggaggagggtgatgtgagtcggcacgcaccctcgacagtgcccgtgatcctggcctagctctgtgaattctcttgctgacgtcctcgcttcgccctgtctccctctcttgtcctctgctcactttgctcttcttggtatgaattactttcatccggctcgtctcgactcttaaaggacgactgggacgtctcggactctgaaaagaaaaagtcgaacgccgcctctggcgcctcgacgccggccgtcgcgatcaagaagaagcgaaacctgaagacggtgctcgcggaaaaagaagccaaactcgtgcgtacccccgggtgcggacgatggtgcacgtgccggtgtactgattcttcgtctacgtgactgatgtcgctcgtctcgcttcgggtggtccggtgcttgcaggccatggccaaggatcaggatgatatcatggacgacgagactccgcaggaaaagaggaggagggaaaaggctcaacaggaagaagccgaagctgctgccgctgccgactttttgggcgccgtctcgctaggaggtgagcgctcgtgcgcgtatcgcctgtccctacgtcgaggctgacctctgcggcgtcttatcgctgcagacgctggggacctgacgaaagccgacccgaagagcaaggatgatttcatcaagctcgcacaacaagtctctagcctgatctttgaacgactacacgaaaagcctctctactcggcctttgccgaagagattgcgaggatggccgtcgtcccgctcaaggacgtcgatacgagaaagatcgggagcgcgatcacggccgtggcgagtgaaaagaccaaggaggccaaggacaaggcgagcgggaagaaaaaggcgagtccacacgagtcggtgcaggggagggtgacctcttggacactcggacaaaggggccgatttgctaacgatccggatgtcctttttttaaaaatgtttttgttcatttcggccttggcgatttcaacgatgcagaccaccaagaagcccgctctcggtgccaacaagcgtgtcaacgagtgagtcatgggcgcgagtccgatcagcttttcccccggggcaacgtgagatttcgtaacccgagctcatgctcatgcgttcccccatttttttctgtgacacttgtgcttccagggccgacacgacggcttacgacgaggctctggacgatgatctcgactttatgtagagggaggctgctctgcgcttttgtatcggggagagagggagggggagagagatgcacggtgctgtagtttgcatgggagctgggacaggattgatcgatagactggactagtgcgtcccgagtcgacgcggtcacgtgacgacaacgacaacgacttgtggtcatttctctgtttgatcgatcgatgacgcgttgactagctcgagggtgacgagctcggattacggcatttccattgaatcccatccatccaactcagcttgaccttactcactgcttgtggagctggaggatgccgtcgtcgtcgtcaacaatgatacccccgattcacatccatgtcggtagttcatcgacactaaataatctggcctgcattgtagctgattcgtaccagatcactgacataactcaagccaggccgatcgcaaagcacgactcgatcaacagctctctttcaccagaccaacgcacagcttcgaaccgaatcgacatcaattcgtcatgtcctcgtcggaacacctcgctaccgacaatgtaggaccctctccgggtcaaggatcgtcctctaccaccctacactcccatggcgattcatccgccggcaacgcctcaagcggcccaggtcacgcacaccaggtcgcccaggcccagggactcaagctggacacggcggcgagcaaccagtcgtcggcagggtcatccggctcgacctcgagcgcgagtaccggagagggtcgaggaggtggacctctagaggggagttataagcgtccaggcgggttcgccgagaaccctaatgcgaggagcaagacgatcacgctcgccgaaggagaaaacacttacggggtaggtcgtaccgtcctagtcgttcgtcaaacgctcgatccgtgctgatcgtcccacttgttgtcgttcctcgccaggctttgaaccgacaccccgctcaaccacactcggcctcgtccctcttcccttcttaccgggtcggtgtttccgaggacaggaacaaaaagtgtcgacgcacgatggaagactctcactcgtttgtctatgatttcggaggtgtcgtcggacagggttactttgccgtcttcgagtgagcacccccgcgcacgacgtgtctaacccccgtctgatcgacgacccagagctcacgtatgcgctcggttgggacacacagcggacatgctggcaaacacgccgccgaatggtgtggacaaaactttcacgagttcttgctcgacggggtgatcacccacccggacacgcccatcccggacctcttgaacaagacgttccactcggtcgacaagcgtctcttccaactcgccgaagaggaccgtacccattcggggtgcaccgccgtcaccgcgttcctccgtgtcgaagaggacgatgagcaggccaacgaacaaggaaatgcacccgccaaggggttcaccaacccgggaatcaaggctcgtgggttgttggagggtaaagggatcgaagagctcgagcgcctcacttcggccggaggcggatccaaagccgtcatcgggggagccgcgtcgtccacccagaacccagacgaatccatctcgagcggaggcgcttccgtccaacgtcgttcgtcccgtaagatgatcaaggatttcgtcaagggtctcacgggtaacggcaaggagtcgtctggggccgacggcggtgggagcaaggaagggaacggatcgatcgagacgatcccggatggcacgccgagcccgttggcgagggaagggtcgatgccgatcgccgatggacatcacatggtcgatctcgtcgagccaaagagtgaaaagccattgagacgggtgttgtacactgccaacgtcggagatgccagggccgtcctctggtgagtcaaagagcacgacgcgcgagtcacttttgtctgacatgcggctttggtgattcgtacgtcgtctcagtcgaggcggcaaggccgtcaggctcacttacgatcacaagggaagcgatgcgcacgaggccaagcggatcactgacgctggtggtttcgtcatgaacaaccgagtcaacggtcagtctagatgaggtgacccgcagcgatcggtcgaccatactgatgagattccacctcgtcgactttgcctcgcaggagtattggcggtcacgcgatcgcttggagattcaagcatgaaagagtttgtcgtcggtgcgccttacaccaccgagacggcgttggacagtgacgacgagtttttgatcgtggcttgcgatggggtatgcatttcgacacaaacccgtcaccaaagcgtcgatgcttatgccgcaatcccgttttctctcctcgcagctctgggatgttacggatgatcagaccgcagtcgaccttatccgcaaggtcaccgatgcacaagaagcttcgagggtccttttggactatgccatcaccaactattcgaccgacaacttgtccgtcatggtcgtcaggttcaagtagaatggaattagtttgccaggtcgcttgtgtgcgaccgtgtacgtgtagcgtcattgttttgtgtttcgctcgagcgtgtgaacaaggctgtcaattaatatgtcgatgatccgagaccagccagagatacaagaggtatacatgcgtctagggtgaccgttcggtattattttggtcacgaacctgaaggaatcattcgatcgatacggtctgcgctttcatcccgctgccatctcgagcattctggatgtaacaagagcctcagccaaacgcccctcgtcgtcagacggcacctcagagactcaccgatcgatcgcttgaccgaggtcgttttgacaactgtccagaatgacacctgcaatctccctgtcgatatcggggaacatctggtgcaacgtatcgataccggcttgacgagccgtagtggtgttgcgatcgatctcggcggtcaattcggtaaagttgaatgtagggtcatccgatggggtcattctgccaatacggatgattaaacgacgctttcccgctgccctttactgacatcacacttacggtcctggaggcggcgttgagaagtctgcctggtgacgagcgtacatctcgttgacctgcagtcgatcatcggaatgcgtcggcgcattcgactgccttcggccaaacaacccgccgagtggactggctgctggctgaggattctgattttgattagatggacttcgatacaccggtcgaggagcacgtatccgggcttggtagctgggtgttcggggcatatcgccacgctgctcgccccctagatgtgacggttgtcgataggccgaaccgggatagtctcccccggcgttttcctcgtctcccgtgccgccaatgctctcgatcatctttcctaatgcgctcagcggtctcgagactgcttcggtcgcaaattcgccagtgcgctggaagaactttttcgtatctagagcaatatttcctggtagcgatgtgagatcccgtgcgggctcctcgccttctgccgtattagaccacgccgcattgattgtcgatgtaccatgggatccctgtgtcacctttgggctcctcggctgaggaggcggcatttctgcaacggctcgttcgatattggcttcaaattcttctttcgtgatgttgctcaatcccgaggcgtccatggtttcgataaaggagattgctccaccctgtatctcaccccggtcagcctccgaatgaaggacgagctgctcgtttaggctcaccagactcgacaggtagtaccctgcttccccctgaaggcgtggtgctgacctgaaacggttgatgtatctgtagcaggtccaagtcgcatcaatctacggtcagaagcggtactggcgtagctcgtcgctcactctatgtttgaaatcatgttgtccggatttgcccgcaagaccacaaagatgaggatagggagaaaagcgtcggccgaggtgttgtccgatccggctacgtgccgtatcaaccctggggagatgggtacgtgagtacctcgtatgacgttggagcgtcgttgggatgcatcagactcaccgaatattaccttacagcagttcaaaatgcagatcatcttatctcggggagccttgtagtggttgatcttgagcaattctaacgaaagccagtcttcgttggccacgagtacgtttggctatgtttttgcctgagagatacctctcaccttgctctgcgaacgccaagaatccctgactggcctcaccctccggcacatccaaatgcttttctcgcacccaagaaaagatccgtatccgttcgctgagcacgaaatccttctctaagtcgtctgtcgtaatgggatagaccgaatggtcgatcatgggcgaaaaagtgctgggaaaagaatcgccaggtcagtcgagcttccgagaaacatggtcgtcgaggatcagcttactaagtgtataaacggttcatgaccagcttttccatagcttccatcgactgctcgaattcggcttctgattgacttttccaagggtccgtttgttgcatcttttcggcaatgaactatcgttgtaaatgtctgatggtcagctattctgcctggcaggtcagcgaacagaggggaaactactcgcatcaaggaagtcgtggataagtttgatctggtcattaatgctaaaaggtcgctttgcgaacgagaccaggaaactgcaacgcggccgcacatcagcttagtgctgcacagatgtctcgttgggatgatgattgtcggactcacctcttcaggtatttctgaattggctcggccggtcgacttcgaagttgtaccaaaaatccctgaaagtcaaaagccggccccttgtcctcttctccttccgtcctctttgtcgaggatgagccgtctttgcccctagcactgataggcccttcgtcctgtctaatcttggaaggggttcgcggagcttccgaagaagatgacctcgatgcctctgagcgatttttcgatgggtccggcgtgccggcggcctctctcgaggtatttcgagctgggatagcaggccccggggatttagacacttcatcagtccgcacattcacctcttccgccaccgcactcgtgcttgcttgtcccgaaggaaagatccccgacaagatcaagcctggagggtgaccctgttgcttgtcctctgttcccgacgacacgaccgtgggtgctgcagctgatggactactgctgctgctgcccgaattcgcatcgctcgaggcaaacgggtcgaattcggcgaggatggaagcatctactcgggcgagtggagaggctgcagacgaggtcgggctgaggctcgtagacgggttatatggagataggagatccttgtcagcgctaggcttcgtcgattctgccgatcgaaagacctcgtggtcagctacaggaacaaggtatgaagatccatgcttcccgaaatacctgtgttcgcgggttcagtccatgggttcaggtcgcccagctcggtgctatgatcttttgtatcgtcaatgggcaaattgatcgttggcttgtcgttggtcggggtgaggggttccacgctcattatagaagtccactcgctgtacaagatagatgagtaccttgcttttcctcttgatacaataggttgccctgtccgtcgtggtatgctgcgttgcacgatacgatcaaatacatgtcccattcctctcattcccattcatccatccatatcgatcgtcctccaacttgccgactcttcgtcatttgcttccgaaagagaacgagctgtgcttttgatcggaagtaaattatggatcaaccttccagctttcctaccctttcctatcttcatcttcaatccatccaagctgcctgcgagactcgacgaatccaagcagtatgctctcgcgagctgtagtattctacttacctacggattcaagcttggaatcatttgccatacgcctgacatggcatcgatacgcgacgccaacctttataccctcttggttcggccttccccggactatcccaatgtcctccaacttatagacagctcccgaggttccgaggtccgatatctacgtgtgaaagaggacaactctataggtccagatgggaagccgaagctcgattacgctgctggaggatatgatgctgggctgtatggtcagtcctccgtttgaagccaaagacccacggctggaagcagctgactccgttccgcctgcagatgcatacacgaacgcaaagctggcttccgtaagcgcctccagcctgaaagcgaagaacaggaagctcgagctgcataacccagatctgcagctacccttcgagttttccgggactttgtaagtgtatacatacaaaggtcggctgcttccgaggctgatcctctccgtcttcttgcggatcttgctcgaaaccagatctttcgtaattgcccggatcatgagcggcaccatactcagcatcactgacaacacctcctctccctcattccttttttttctgtaggaatggacgttcacattcgaggggtgagccgcaattttgcatcagctatgcatagcccgctcttgctgaaccgtaaagaccatcgcgcacagccacaaattcaggtggaatcgcccagcattccattcctccgactatgtttgctcgctggatcgcaaacctgaccctagcgtacagttgtgcttgtaagtggcctcgaaccgcccgccgatgtggctcggtccggatgctaaacctcgctttggtattgacaatcgtcgacagagggagagaaccggcaaaggggaaagacgggatcatacaattattggattacaacctcgagcgatttgactttgaagacaagaagggtaagtagtcagtcgcccctgcgtaggtgcctcttagccgttcgagagactcaattcgctcttcataggcttggagattgccatgtatgcctcgtaagtcggcatcgttcttactaaaccttgcccgactcctcacgctgacactggtggagattcagtctgttatcgatacttgacgccgcggaagacaggctctcagcgcgggatggcaagcctccatccgtacaacccaaagtgacagcggcagaaacgggcgtcaccggtcctggaccatccggcaaagagcgaagaagtagcgtgggcaggaccactgaggccgatgatatggccggtggcgtgagtctatttcaccccgttcagtcacgatcccaactgaactcagttgcgtatcgtcgtacagagccctaatgagctttacgttcgagcgaacggatcaacggtagactattcggcaagggcggtttcgcttctcgctgtaagcgcagtttgacatcgagagacgagcgccggtagctcatcgtcatgcgactcaggatccgaacgtattgttcatcatcatcaagactcggcaagccgaagcagcccagaaagccgtcgaagtggcggatgcgaccaaaaggtgagcctgctgggctcgtgctacggcgccttgatcaacacccactaatacgccacttggtgtatagggcacgacatcgagccgggctggatcaagactcgagggggctctaccaatatgtcgtggaagatgaaatcaagccggctgctaaaccgacaaatactcagccgggtcccagagtgatcgacctcaatgacgctccgaaagtcaaggttgaatccaggcgaaggtgagtgaggatatcattgccgccaaggtgacgatagcttaagctggttaccgaccgcagcgacaccaaatcttggcggccaccgcccaacatctcggtctacctgtcaaagatcgaactgcccgacttgcacccgggtcgactggctgcacaaaagtcggctgcagcacctcgcagctcgcagctaccgcctcctgtccagcagcctgcaccttcttcgcgaaccaagcagacgtcttccgggccgggaattggtcacgccaatctgaggccagctccctcgaatccgcccgtagcgggatcgtcgcggcaaccgagtccaaagtctagaccatcgccacccaatgttccggccgctagtaactcgaacaggcctcccatttcggcgccaactctaccttccaaaccgcaggtaccggcgcctacaccgacccacctgcctcccgagcccgaaccgttcggtctaggcagcgtcggttcgaaaattgcagcacgactattctcctccaagtgatcgatgtccacgtaacgcatttcatctcatatccatacccgatcaatcgctaccggacggcttgtccttggccaagatctgctcgacccgctcttttttccccttgttcccgcctccggtgatctttcggtcgacccgggttccaatcctgatgtcgctcgagattcggggcgtaccgagcttgtgtacggcgacatggcaatcatagatgaccttggtcactttggaccactgcagcgcatggcgagagtctcgtatgtgagcttgatgaaagacgccaatctagaggaccggggcgatcggcggcttaccgggccttcgatgttggtcccgtagccgtgcatcgtgtactcgataccgctcttttccaaaacacgttgacactgccagagtcggtcatttggtgagctcgtcgtcaccgcatcgatcatatgtgaagggacagacaacgatactgacctcggcgatctggggacctacgctagggtcactgagacccatggggatcaagcagaggtccgctacggcccatagctcttcaccgtcattgatctcttggtttgacatggtcggacactttgagttttcgaatatctgatggttgttcaggtttttcacactggctgtacaatgcacgatttacaggtacggtggagtgacaaacagtcccgacctttacctgtctcgacccgaagagtcgggcttatccgtcgtccgtgtcagtcaagtcaatgatcgccctttcaatttcacgtgacaacctatttcctcccgattctcttcgtttacgcgagctgactctcaccctcagagagtatataacgctcgaccattcagaaaacccatccaactcccaacgcccgcggtctctttttcccttttttctttcaccttactgagtcgaccccttagcaactcatagcagtgcaaaaacgtcaatcacctcgtatctccacgagggttgtcaccatcgcggtcagactgtggaacaaatccgtaaaggcctcatttaatccctttaattagcggcccaaaaagggttcgcgatgatgttcgagtttcatattgagcccacatgcagtctaatatcactattcatgagtttcctgtcgaaatgcatcactgtccatcatcttgtctagattcagctgtaattcgagtgggaagctgctgcccaggaccggacacatggtctttcgccgggtttctcgaaaattcgtcatgctacttatgcgcaggccacatgtttgatcgtgattacatcggtaaaactagtatcgtaacgtctacatccttctcccttctgggccatctacacgatagcctccaactcgacggcatagtccaaagccgtcttgatgatcctatccttggcgatcggtccgtccccagccagacctgccgtcgatccggtaggtccgtccgtaaagctcgaacccgggttcgatagcactcgagcgagactaaactctcgggtcgttggcgagaaagaccatcctcgctatcgaatcatttgatgcgcaggagtaagcagacgtttgtaatcgggaccagacgatgcgggcgactcgactggactcacgccttgaccaaactcgaccgtctcggattcgttcttgaagaacaacaacctcgtcgcatcagccaggggcaaggtggcatacgccttttcgtggcacgaagcgatctcgtttctgcatgataccgtaaagcaacgtcagccatcagtcttcgcaacgtctcagtagccggatcgggactcaccggatggtcccgacgagaccttcgagcaagacgccgtactcttccctaggcaccctctccctcgctcgccagacctttgtataagacccttccatcaaccaccgttcgctaagatagccacacaaagactgatggtaagattccgcgatgcgtcgctgattcccgagcaaggcgacttacaggtcgataggccatcgaacgtacacgtcgttcatcatctgttcgtccagagtctcgagtacagtgtggaaatcggcgattctcgaggaagccagcagcgagagaagggacagtccaaggagagggggctgggaggtagaggttggcaggatagacctgtggcgagagaagtcgacaagatcagacattggaatggactcgaggcgcgaccatggcgagactgacttgaaatcccggtagtaaccgctcaacatggtctcgtaacgttcaaacgccttgacatccctgaccttgagcgaatagaaggctcctacctccaagatggagcctggtacaatgaacagacggtctggtcggcagggattctaggtcactcgactatgagatcacgtacgagctgtcaatagatcgtccttgtcgtgctgtccgtttgggctcaaaagccctgctcttgcaagggcgatctaatatgaagctcattacgatcaggacagatacacatgctgacgagaaggcactagatagcctaccttgagttgcgtcaactgctttccggctgcagccacatcgcctgattcatacgcctgctgcaggctcgtcaatccttgtttgagctgtgtgtttggcatgatctgcaggtttcgggcgtgtacgctatctatactctatgtgcggccggtactctctccaggtgtaggtatgaaaggtgcagttctgcgacgatacggttgattttgtgggtgcaataccgctctgatcacgcttgcacgctcgctcgccttctcgcctgacgctggcgtaatcaatcgggacgaaaccaaaatcacgcgcgagcagtccatggtctaagcaatcaaacgtctggcatatggtcgatccttgtaagtcaaatatagggccatcgcacaacaatctcggctacttcctgccttctacagctcgccctcttccctgtcttcgtcggctcgagctcgctaagaggtccaagtgtaagtcgatcgcaaatcgatcggtttctgcacctctagactcaccttcgcgacatgcttgtccgcatccccgtcgctggcctcgccgtcttcggcctcgcggcgtctggtaccgctcttgtcttgcttgggctctgtatgaccgcttgccaagtctttggggtcccgcttgcccttctcacgagtcgggctggctgagcggcgatcgtccctgtcccgcctgtggctgtctcgccgctcccgctgtctgggcgagccgtcttccgatcgatcgtggtgtcccctttccctctctcggtcacgaagcttttcctatatcggtacagttggttagcatacggcccgacgtagtcggtaggtcaaagcggactaaccttttgacgcctgacaaacttttcaaacacgtcctttctagcctgctcgtccaggtcttcgaattcgcggaactggcccatgatggtggcagcctggtcgagtatcccaagtcagcgtgcgaatccatcaatgatatgcctggcgacatccgctcacctcgttatatgacccttcgaggttgataggcggctcggcctttttcatggcgtatcgcaagtcgtccatcaagtgacgcttcctgcgctcggcacgcttacgttcctccttggccgctttctcgatttgagcttgcagctacgtgcaggaaaaaagttagactcgcggcctcgacccgttcaatcgacgaagccgtccgagacccaccaaatcaaagacctgagcaacatggtgctcatcaaccaaactagtaatcttcaactcgtgtagcatgtccgagaattgctgtcgagtcatctcagctgccactattttgccggccttttcgacggcggtcctgatcttgtcggcgctggctgcgatggcttcaccaatgtcatccacaacgtcctggaacaagtcgagcggtccagatccaggcatgccgagaatggcctcgtattcaggtcgggtctcgatcaagggcaacaagtccttccacttggtggtggccgtgatctggccggcatcttccatctcgctcagtaaggctcggaagccgtccctggccttgcgggccctcctgttcctttcgatacggttccgacggaccttttcctcgtggctcttcatgatttgcaaggcgtagctatcaaacgcgcgaagaacgtcgaggttctcggcctgcctcaatttgctgtcctttttccatcgttccgactcgtggaccatctcttgagccgtcttccagcgggtgccgaccgtgatgggtaattcccgcatcatttcgtccaagatcttgacattgcggtcgtgcaattctctctcggcagcctatcggaccagatgcgtgagtcagctaccgcccgggaacagccatgtacgccggaagaacccaccttttccttcatctgcagatcatgaacaaactcgtcaaacagctgacgacgctcgtcctctgcctcgagatccttccagtacttttctcctcggaatcgctcgtctgcgcttcggaagctcgtccaggatttgatgtgccttgaatttctcgccatcagacgatggaggtaggggcggaagcggtccagacggtctttcttgatgtgctccctgttggcaatcaggttgttgacgtactatagaaagggcggggtcagggcgatgtagtcttgtatgcacgccattctgctcgctcacctttgtgaatgcactcttcttttcggccaaagtaccaagcgccttgtacaacgggtccatgacgatggtccccatgaccttgtcccaagtccacgtctcgtcgaccttggtctttttcaacaaccaaatgaaggcttcttcggcgtctcggacgttggtgtatccaccgggaggaatcatgggagcgggtccgatagcgagaaggtcgtccttttcctcgagctcttcgtcctcctcttccttcttgacaggggtcggagagcgggatctggatcgacctcggatagccaacgcttgttcgttgtccgcattgtcgccctcggtaagcagtcgtcgcgtcccgtctctgccatatttacttgttcagcaacccagtcaaacgattgctacgaaactactactcactctccagcctccacatgctcgcccctggctctggcagcatcgacatcgagtttcttttgaagctggaccaactcgtctggcatgttccactacaacaaccggtcgtcagacttgaccatcatgctgcgatcgcgacacccatgttcgcttacctgagtctctttggtgacattgttgacaaagtatgtcttgcctttggtcgaatactgtttccacttggtcgtagcgatcgctcgctgtccgtcgcggaatgcttcgaatcagtgatttgctccgatctggctcgacatgccgggctcacctcgaagggggacttgagcgcgtcaggcttttcccaggtcgattcctttgttatggtgttcgcccagtagatctttccatctttgctgttatactctttctgtataaaatggcgagagggttgagctcggtctttcggaaacgttactcgagccgatacttgcccattcgccggtctcggacgcgacagacatgatgatacgtcagacgaattcgatgcttgatatggatcgctgtacgatactccggtacttatagctgtctaaaagggtcgaggtcgaggtcggtgcatgttctttggtgatcgctttgatgctgagatcctcgaggatacctgatgcgatgcatgagcgagccaaggttccggttcttggtcacgtgatacccaggttgaccagtagcatcgacggggttgagcggtcccaagagtgtggtgtacagacatcagcatcaccatcaccatgcacattcactgcgattcccctgggttcacatggaggtataacaactagcgggagtaagagacacagtgccatggatcaggtatgatggagcgcggccgtctgtgcggacaagctactcgcgagctcatgcccactcttcgtacatagagtgctttccgtaaccttttggcatctgcgccgccaaaggccccagcggctggtcgcgctgccggagtattgggaggacaatcgttgaagagggggtatggaaatgcatccagccgccccaaagatttgtgagctccctcggcttgccacgcatcgggtcttcattctgatactctgctttattgctgattagcacgccaaaagaaaagtcggagaagggagaaggttctaaacccgagttcgcgccgagaaaggtcaagaaggatggcaaatacaaagaccgagccgagatgcgtcgattgggtttggaaaccgaataccagcctgtatgtcgacgacggagattcccgtcttatgaattgctcactgacgcacgcgatttcccctactccgtcgaatcagatcgagcggatggtggatgagttcgaacagcgggtaaaggctgagggagagaacgcggaagatgtaaatctgcttattactgagcatgacctcacagctcgcttattgtcctttgcactcttgcagatcgctgcgaaacgagcctacttgggtggggatgccgagcattccgccttgttcaaaggactcgactatagtctcctagaagttcgcaaggccgagctcgcagcagaggagggtcacaagttcgatgacgaattggacaaggtgcttgagcacgctttgccatcagaggaggtgtcagcggaggctggacctgggcctggcaccacagggcacaagcggtctagggaggagatcatggaagccttgcagacgagcagaaaacgtctggcagtggacggcgacgagaagaagaagaagaaaccgagggctgatgttgcgacggatgcgccagccgcaatacccgggttaggaagcaggttcaagaagatcgctagcaccacggtcgaggacggcggaaagaagaagaagaaaaaggtgctcagggtcgcccctgccccagtagccgcagctgtggtcccagctccgcctccccagccaggattgacaatcatctcgtccaaagcggatatccccgaaagtccagccgtcatcttggaaagggagaatagaatcaaggcggaactagcgagaagacgatcggtaacccctccggtgacgaaaccgcccctgttggaaccagctgcggaagatcaaagggatccggaaccccagcccagtctgccgtcattgtccgcaatgcctatacctgccgaactaccgaaaccaagtgcagctgcgccaaccaccctcgaatcagacgaggaagacatctttggtggcgttagcgattatgagatggatctaggcagcgactcggacgaggaagaaggggccaagtcggtcaagcctaaagccgttcctgaggtcaaaccctcgacgaccaagaaaggcaagggatggtttgatgatgcagaggaagaagaggaagctgcaccggccgactctatgcttccaagcatactacgaaccaccaagccggtcggtgacagctctcagcgacttcaatcccgatcaccttcaccagaggacggcacccttcggaggttgcagccattggcatcctcgaagcttccttccgctaaagagttgctagccatggacaaggctgccgaggcagacgagaagcgtcgagagaaaaaggccaaatggcgagccaagcagggtctcgcagcacaggagggtgcaggccaagacgatgaacggggcgggaaccgggacatgacggacaaggaaagggagaccgaagagaagcgcaaattgcacgtagagacccaaaggctagaggcctacatgaacaagaagaaataggcttgagattccatgtatgatgatctgctcaggatgatattcaaattctagatttagtacgtccttcctacgccctgacatgcacgacacaagtcattatcgaacccaaaaaacgaaacagtctcgcctgttcccccacacttgaaacatggcctgggtgtcggggtgtcctacttagcatgtgacacccggcatctttgagctgagagaccaggactcacatcccacccagtctgggatcacccggctggacgacgagcgctcctggcggagcccgcatacctccccatccccaccctccgccaccgtgtgagacgaacattgccggtggtggcccacctccgcctcccccaccagggtggccgaagtgagagggatgttgagtcatggcaggcggtccgaacggatgtcccggaaagtgaccgctgggtagtcgatttgtctgtccaccactggcaatcatccccggtcgaagcgcgctattattcatgatgggccgttgaggcggtgcataaccgggttgaccgccgacctggttctgcgagagcgtcatcggtcgttgatagttgttggctcccgtcgtggtatctatcgagtcgtttgtattggtcggccagctgtaggacatggcctgcgtgtagggcttggagtgtttcttccagcactgccgaccgaggggaacgagtcagattggcttggcaccgatcaggcgcgttcgtgcgcattctggtaagtgggtcaggctcacagttttgcaagggtggtacggatcgtcgttcttgaatcccgtattgtaacctggatcgcacgtgtagaatgcttcagtcgcctacaagagtaaaaaggctctggatcgcggactcgcattttgaacagaaatggcctttggggtaaatcagcacctttccctctttcaataacggtcttcctggggtagggatctcggtgggaccagacccctggggaaccgaagctgcggagcttggacctggtcttgatagcgagttcggaggcggtgcgtgcgagccgggctgtgatgaccagtgggacgtcgatggtccagcccagctatggctagtcgaccccataggacccggatgtggtctcgtctgctgaggggcatgattatgattagatggcggcggaccgttgaaatccatatactggggtccctgagcgatagattgctcatgtgttatatttccaggcgcggcagaatacgctggaggtggttcattcggtaccccatcagcgtctacctgtgagctgggggccggtcgggccggcgtcgagggagcgttcaacggtggcgcatatatgtttggcataccgagcaagttatccctgtctttatatgctgtagccagggctggtgaatttcaaggtgcctgtaagccggtgcacataagaaagaggtcaagagtaaagacgatcacggacgtcaccgaagtcgtcatcccgtagtgcgtgaggttcgcttcaacatttgcttccgagacgagatgattccggaatcaaatggggaaccaactagctggtgacaaaaccttgacatgtaaataagttcgcaatctcgagagatttcggcaacatgtcatgaaagacggaccgctcaaaggcggcagctcgactggaacggctcgattaaagctcttcaactttttctgctatggattcgggcagcgatgcggacgacgatcttagtcctggtcctgtgggcaaggaccttgtcatgatcatctacgttcacgggcaagtccgcccctccggctcgtcatcgacctgacatccaaagattgaccgggtcacctgcttttggtggatatttatagttttaaaggcaccgacgtgacgttcgaggagttccccgaccggatcagacatctggtacaagccactttaccaaaggtcaaagtccgcagcgaggtctttcccgtttatgagaccaagggagatttggtaggacattacagtggaaggcaagacagtgaaaggaccagaatgctgaatcagcgatcatgcagacccacgctgttgagcgatttgtggactggttgacggaactcacggttcatgctgaagtggaccatgcacaagccggaggttcggggaaggccaagattgtgctttgcggacacaggtgagtctggctgcaggtgacgagagaccaatcagcagtggtcttgatggatcccatgatctctcagtatgggaggacttttgattgcggactcggtcctgcgtatgcaagcacacaaacaacatccagcggaactgttgtggcctaggatcatcgctgtgatagcctttgatactccggtaagtctagatatcatcattgtgctctgttgtatcgagaggctcacgctgatctttgaactcagtatctcggcctacacccacatgtttttgtgcgttgaacctccaaccgcaaacgaaggatagcttgttgacaaactccctttcctttacagaaaaacggcattaccaagtacacgggccacatcgagacggcgcgaaccgtgctctcgactgtatttggaaacccagagacgtcttccgggacgacaacaccgaccaagacagatagccctcctgccgcctcgtctttcttctcgtttccgactcgccaatcgctgctgaaagcctctgcggtagctctcggcggagcggccgcggtagggacagcctattggagaaaggacgacttacagtccggctggaagtgggtctcggaccatgcagtctttgtcggcaatctttgggacgatacgggtatgcgaaatcgactcgaaggtctggcgggtatggtcaaacaaggtcagagggatgggattgtctatcgcaagtgagtctagcgagactcgtacccgttgagccagtattgacgcattacacctcggatacagtttttacacccatcttccgccctttccaccgcaacacccgacgaaacgtacgttctgcctcttgccgtctaccacacacccactctggccgttctggaaaccggtcacctttgacaccaaaaagaccgaggacgaagtcgcttctcacctgggcatgtttaatccgagatcgaacatgagcttctatgaactcggtctagacgtcgtcgccgccatagtggaggcaatgggaaccgtggaccaggaggaagatggcgaggcagatgtggagatggactgagttaaggtaggcagtcattcggttcatgcgccgactttttgggtctcggtgtttccgttgtagattgtgagtctaatggacgggaacatcaggttgaacttgatctgatcagactgttccgactcgcagagcatatttgtatctcctccaagatgtatatagatttcatctgatgcacgatcgataagcaaccggtaaacaatgtgccgttctcccgacccttcttcggcaatgggcgatatgcaaggcaactacatcaggcgaacggatgccttgacctcgggcgatcaggctccgggataattgagtgaggtagtcgtccccgtcaagttgagcagacatagaacgctcttcctagacaccgaatcccgagccattagaatccgaggaagagaaggaaaaggaggagccggccggaagctgggtttccttgtgcaaataaatgacacggatgagccggttacacgaggagatgtagatggcggcagaatcggtcctgatcaagtcgagcgattgagttctgttctatctggaacattagttgcaggttaagtgatcgtcgggaaatgcccactctccgctctttttgctcccgcttcgatgaccacgcgggattgatcattcgtggtggctcttcggaagcaattcccacatttcctcccggggagggcagggatcgtcccatccatcccccatgtagaaggtggtggagccatcatcctatgtggttgacctcatctggtgtcgatatcagcggagctactgaccgccactggctcgcagtaaacaaccccagctagttataatctgtttgatctgattgatacgaggaaaacaacgacttcaagagcacaatcacaagatgggcctcaattcgcctgtgcccggtgagcccgatccaccaccctttcgagctgacgtcccatcgtccttttgctgacttgcaccctgataccaaaccccatgcgccgactacagtaacgcttccgcaagaatgccaaaaggcagccaagatctttcgttctttcgtcgataatggcaataatgggctggacaaggtcatcccaagggacgtactcgcgagggccgcagggttcgccatctttaccgtcgttaaagcgtgggtgtcgactgctttcggagagatggcacaacaacatcttactgaatctcaaaatttcgccttttctcgatccatatcatggtacggaccttgtagcgggttcctcttttccgctcggggaggctcggggatcgtcatcgcacgactagaagacggctgtgagtcctgctcagcttctgtggtcgtactctttggagaccgctaacatccttaccggtttacccatatcatcgttgcatgttatagcttggtcggcgccgagtgcgatcggattgggaggatttggctttgggggtcagatgggagccgagtgagctcacttggctgtttgccagttgttcagaggtatcgtcagctgatcttacatggtgatgcgtctgttgcagggtgacggatttcttgatcatcttgaatgtaagcagacttttcactgttcccatgttcaagataggctgttaatgtattgaaacgccttgccggtcatagacgaagactgcggtcaagaccttcatggccgcgggttcgatgacgcttggagggaacttgtcggtaagtacatttgagtcatgatatataagagcacaagttgaacgcagtctacggcggtccctgcaggtcgctgtgggcccgctcggaagaaacgctgaaggctccggatccgtttcctccaaaggcaagaccgctgcgctctactcgtactccaagacaaaaggcctgtttggtggcatctcggttgaaggctcccttatcgtcgaacgacaagatgccaatcggattgcctactcgcaagatgtttcgagcaagcaactcctctcgggcggattagaccgtcctgaatggtcggacgaccttatcgacgtgttgaaccaatgtacaggcatgcctgggggcagacaatgggtggacgatcgatccaacgcgggtacaccagacatgggggacgagtttgatgacgaccgatatgacgagcatggaatgccggtcaaagagggaaggaaacgagcgggtaccttgccgaggagctcttcgtacaacaactacgctttcggtgaaggtggcggtggattttcgtcgtccgctatggttgccgaaggcaagtcgcccaaccgagccagaagcgggtccggatcgctgcgtgggattttcaaactcgattcctcgacgcctggtaacggcatcggattccctcgtcgaaagacgggttcacctctgagctcacctggaatcagcaggaagaatagcaacctaaaccctttcaaccggaccaattcgagctcgggcaacacttctgccaatccgttcgacgaggaacccagctcaaaccacgccaacgaagtcgaccctttcgactcgtatgccagcattctcgatcagaatcagggtcaaggcaaccgggccaggtctggttcgggcatctcgaaggacatggatctttctggtgaggttctttcgccttggaacaatacaaagggtctgccttcccccaagccgacatatgagaacaaaaacatgccccttccttccgaactgagttcggggaataggagcaggagttcgtccttgacggctcccaactcggacgattacggcgcgagtctcggtcgaccggggcttggcaggtcgagagcgagcagtacggccaggttccaatctcccctccgggacgactttgccccgggcgatgaagtacaagatgaggggaacgatctaacggcaaagttcggcaagctgagagcatctcatgcatcgcccaacaaactgtccaagcgggatacgagcggatactcgcgcaacgagtttggagaggatggcgaagattactacagcgccaacttgccacccaagaagaaggaagagtggaacgtcgacctgtcactccctaaaggcgtaggtggtggcctgtttggcaaggggaagcgcagtcgggcgaatacgggtgggagcgactttcatgtcgatccgaggcagtggcagatgcgtggcgaggatgaaatgtacggcggcgggacaccaaagaacgagacgtcggacccgtactttgacaacgtcgaaaaggacgatttcgttgaacccgccaaaatgggcaggcccaagatggaaagcaggccgaccttcactgtcaggaaagaattgctcgaggctgagcgggatggactatcgcgggcgatcgccttgttcgatttcagcgcggccgagagtggcgatcttggatttgtcaagggtgagattgtcatcgtgaccaagcagggcaagagtaaggaggagtggtacgtggcacacaccggcttttgcaggtcccgtctcgttgctcggaatgctcattctcaattactgtatatcttccaggtggacgggtcgtaacccagcaactggtcaagaagggatcttcccgtgagtaccatgtttatgactcggtgacgcaaaacacagactgatcgggtctatctctcaacttggccagagccaactttgtggagctagtcaagactgcaggacagaaatagtctcatctataaaatttgacgtgtaagacacaagttgtacacgggagcatgcttccaagggtcctgaaaagagtatgattgagtgaagcaactatgatgcgtgaagaggatggcagccgatatcggcctcttgatacgcatcgcctgcgggatccgggagccgaagagttgtcggatatatttttgctgcggacgggtccagttcatcgtctttgcgcgggattcatcatcatatcgtcaggggtaaagacgtcgggaaatgttcgtgctcaccttcagcaactctatctctgtctgccactggttcattccacatcgaaatccaacaagccgatcttcgcatcggatctcagctgagctgggctgtatcacactatcgctgcgaccgtccacaacgacgccgggcgcttgtggcagaacaagggatctttttgattccaaagtgaacacgtcgttcatttgccatttgataatcaacctccgcacatcgccccgacggaccacgtcaggcgaagacgaatccatacctgcgtaacgccgacttgtatcaggcaccggtaacaaacctgctacctagtcgtataattctggttagatcaatatctcaagacttcccgcctcatcgaccatgccatctacacacccgcaagaggccatccaaatgaccacccagcttccggccaaaggtacgactatacctatggagaacggaactctctctgtgcgaccttaccgttcgagctcgacctcaaagctcaaagccctggtcacctttacaccccgagcatcgggtctcgatcgcaacaatgtcaaggccgcctcggacgagtttcgcggattttactccttgttctggataggactcgccttgctctttgtaaggacgagctatgattcatgggagaccaaccggaccgtactctcgaccacgtttgggaggttgatcacgggggacgcactcgtgttggctctcagcgatgccatcatggtcggaagcatgttcgtttgcgtgccctttgtcaaggggttggtcaacgggtggtatggatactattgggtcggggtgacccttcaacatgcttggcagtgtgtcttcctcgggatggccatctggtggggtttccatcgtcagtggtactgggttcagtctgggttcctcgtgctacgtgagtgaccatgccgaaatgcatttccgcggggcagagctgataggaaacatcgaaacaacttctagatgctctttcctctatgatgaagatgcactcttactgtgcacacaacggtatgctgtcggacatctaccgcacattgaaaaaggaggaacgacgcctgtccgacttgctcgctcgacagcccgacggaggcgaggccattcgacgcgaggccgacaagaatcgagccgagcaattggtcaaagccaagatgggcggggaagatgctggccctctcgctgctctgaaagaaggctccctggacgcatcgatgtcggtgccgggtacgccattgccgctagggacgcctgcaattccggcgggtgcgacggctgtctcgacgggatatatctctcactccgatgtcctgaagatgcggttgggaggaaagggccgagcgcattcgaacgcatcgaccgtgagcgagacgtcgaccgctggagacgagtcgttcgcaacatccagtgcgctcgctgtggccagtactgctggagcgcgatcgagggctgccagtgtggccacggagatcccgctcggaacttctcttgaacctacgcacagcgccctgggagctacaccggaaaaggacgctcatgctttatcgtactcgtctgattcgctcgtttcgacactggcctctaacatcgacgccatgcgagccgaattgacatctcagggtagcgacgacgcgacgacggccgggatcgaggcaggagaaggcaaagcgatcgtctggccggccaacgtcggatggaaagagtactggttgttcatgtgtatgccgacgctttgctaccagctcagctaccccaggaccaccacgtgagctctccgtctgcgtactcctgcttatctacacagcttatccctccacttcactacactgcactacacttcaccggcttcagcttccgtcctctctacgtactggaaaaggtctttgcgacatttggcgtgttttcgctcatctacaccttgaccgagcactacattatgcctcacatccctaaaccgggtgaccccctgctcagggcgtatgccaacttggcattgcctatggtcatcaattatctactgtgagcatcggcgaggttgccgtgcagagcacgatcagctcatacccgcgggtcttggtggtcactgtttgataggattttctagtcagtaacgcaacgcgacgcatcctcttgcaggtcgaaaatgctgattgaattctctctgtttcttacagcatcgtgaggagcacggattcgtatagcagacgatactaagcaataactgatcttgcctctatccgcagattttcgaatgcgtctgcaatgcctttgccgagatgacatagtgcgtcgactcgactgctggttgaactctcgctgacgtcggttgtgcctcgtgtaatagctttgcggaccgagaattctaccaagactggtggaactcgaccacctgggatgaattcgctcgcaaatggaacaaacccgtgcacgtaggtgtagacggaacgcatcgctcgagtctgctattaagctaatagaatccatgactctctatcatagacctttctgctgcgtcacgtctacgcgtcgacgatatcgacataccgcctgtccaggatctcggcgacgttcttgacctttttgctctctgccctgtgccacgagctggtcatggctgtcgtctccaagaagatcaggtgagtgattcttgcccgatctgtctacctcgttcacaaagctgacaactgctcgtaccagaccatacctgttcgctatgcaggtgagctcatgagctttgaacgagctgacaacctcctcatctcgctgatgtatctggtctcgtcacgtagatggctcaacttccgatgatctatgttggtaaacttcccatcttcagaaggaacaagaccgtcggcaacatcgtcttctggatcggtctcatgtccgggttcccattgctgtgagttccatgcaatcgcgaaagacaggtcggtgctcgagcctgaccatatttgcggctttgtacagtgccatcgcatacttggtctactagcccgatcgacgttcactctcataaaatcaccagagaatgagtttgcttttgtcgctactactgtattacattactagtccattcggtcctatgagcaactacagcatcgttctcgagatctatcgggttgctccgagatgaaacgccgagggattgacgtcagctggctagaggtgccatgtgacgtcagctagcgcagagggcacgagcccaaggtgagcgggggaatgagggggacggaaggagatcgccgggggctttgtggaaatgggtttgcccggtcgatccataccatcatcgcatcatcatcatcatcatcatcatcgtcgtcgtcgtcgtcaaaggaatcaaaggaacgtcaactggatcgcatgggcaaaggatcgcggtatatatagagcgatgcgatggggcacggtcgaaacaacttgccacaatgtcatttcctctatttaggaatgacagcggtcctgacgtacacgaacagcctgaaggtcctgacacataaacgaacaattcgacgacactctaacacaaaaggaaaccatcgccatggccaacgcacaacatcaagccgtcctctccatgctcgagcatgaccaggtcattccccaggtgttttcgaaacctctctcgctcgagggcaagatctccatcgctttcccgtcccataccgcttgtgcaggggagacggtcgagaggatcgtaaccaaggatgtgcctagcatcatttacaagccattcaatggggctacagggatgaacgctagcgatcgttacactttgtgagtgcgattcagcgcatcggcccggtcagcatagcgactgaatagcggttggaaccggcatcaacaggatcgaggtcgatcttgatttgctgcagccaaacgatacgatgtcgggtcaggttcgacactggttccagagcaacatcatcatcgacccttccagcctagacaaggacggtcagattaccgccaagtatgacgatgaggctatcaccgagtacctgcctagctctcctggacctcccggacagtgagcaggcctcgatcgtggcatctatctcttgaccgctgctgacagcatgttccccgttcgcgtaacttcaagcaaacaccgctacgtcttctgtctcgcccgtcaatcctcggagggaccagctccatcggccgcggactttcctaaaccgtcctcctcccgggctgaagaagacatcaaggaccgcgctggattctctctcgaatcgtacgtcgaggacaagtcgatgagcatggtggccatcacgttcatcaaggtcgggccggacgccgagggcttggtagagaatgccaagttgagcggggaggcgatcttgaacaagatcaccggccagtagggtggaagagtgacgtatcatctttgacgaacgacctttacgaaccgggatttgagactttgcctggctttcctcggttcccacccttagtcggaaccgaggcaattatcaccatgacaactgtaccaggaagcgatcaatcatgaaaatgcagcatgcaagctcagagcagcttggcgatgtacctttccatcacccatagtctatcgtccttgaagacatgtctcgcaaagatacggctcgagtcatggccaaagcggatcgctgtcacgactcagcttgacgcggtcgtcgatgaactcatttccaaaagttgcgaataaaaagtcgcgaaaatgataataccctactgcgttctgtacacgtacatttgctcttgcgcatgcgcttataccgcttatttaccgacatacttcagatgggcctcgttgtacctgcatccgaaaggacaaagtcttgtcagagagacgcatcgatttattccctcgcaacgatgccactgacctggcaccctgaggcttggcatcttcgaccaatttcctgatccccttgacgtcgtcctcgtcgagcttgacctcggtcgccccgaaattctcttccaacctcgcgctcgacctcgtccccggaatcgggatcgcgccttgcgagatgacccaggccaatgccaactgacccgacgtgcaacccttcttctgggccagcgcttcaaactcgcgtacgatcttcaaattgctctccatgtgttcctcttggaaccgagggatcgtacgccggatatcaccttccccgaaatcactgggcttggtgaatttccccgtgagtacgcctttaccgagaggagagtaagcgatgaccttgaccccaaactctttagccgtgtcgatcagtccgttctgctcatggtccgtgaaccagggggagaattcgatctgaagggcgtcgatcttggcgactacaccgagggtgcacgatcagtcagtcgaaccaattcaagcggaaacgcgccggccctacttactgttgcaagcctttcggagcgtctcggcggaacactcggagagaccgatatacttgcacttgccggcctttctcacctcgttcaacgcaccgatggactcttcgaggtccctaccaggctcaattcgatgaagatagtacaagtctggagtggttccaagccgctcgatcgagtcttggatgtacgacttgatgtgctgggcagagttgtccaccgcgcccgtaggtccgtcgggaccgaactggtggacatcagaccacgtcagtcgagatttggctgcggagcgatgcgatgcgatactgtacgactcactggcataccgcacttggaagcgataaagactttttctctggccccctcgttctccttgaagaacttcccgatcaagcgctcgttgtggcccgagccgtagatggcagccgagtcccaaaaggtgcaacccagctcgacagccttggcgagggtcttgagagattcgtcgtcgttggactccccgtaactctgggacatgcccatagctctaatatgtgaaattgagcggtcgtgtgggtgagaggatatgtaatctcgagatggactcgagcagggacttacccaaaaccgggtacggcgactttgatgtcggcaaagggaacggtagtgaccatgatgtaaggatcttgctggtgaaagagattttgtctctggttgtttcggaacagggatactacgagctctactttgatctcataggagcgggaactcgtgaagtctgggcatttatatacagctcgacgggtcgcacctgacgtgcggctgcagcggccctagatgatacgttcgagcgggttaccgggagatcatcggttccggttgaatgcttgcctccactttccgatgatcgtcggcgccgcacctccacccacgacctccacttgaagcgcgggatatcgatccgcagcgataattgatccctggacttctcatttgacacgtcacctgtgaggaattttgcattaacgatcttttctttgatactgtcattcagaaatttcctttccagacccggcagggtcgtcaaaacggaaaacaatcgatcttctacctcgatcatcaccgcgactttccccttttccctctcatccttccaagttgtgagtgaccagaccccaaacttgcacgtgcgacttcacactgacagtgctatctcacccactatctgcagttttaccatgatgactagaaatcgactctgtgcccgaagagggcttaggaggccgatgcgcgcaatgaaatgacccgtcctgcacaaggacaaacggggacattcaaagcctcgacaagaggaatcgcacgaggatcggatcggactcgtctccgcacgtcgacctggggcttgtgctgccgaaacccagagtgatccgggtctcggggggtctcgtcccggtcaatgagcgcgagtgcgaggacgttttccgactcttttgattcttcgtgtcggggtgtccccggggcttgacatcgagacgatcgggcgtgctcttatcttgttaacccaaaaaggatcgctccactctcacccgtctgacccaataaagacgttggaaaggattatacaaccacgacgatacctgtcgacccctcgacctcttccttcctccccccctttccctccgctacgtctccccgtgtctcgatcgttgtgatctgcctgcttgtagcctcaacatgattcgaccaatatacatatattccgcccctgctctcgacttccgcttggcagtcagtcattgtgtttgcccggcgtcgactgaccggtccgtagtatcaggtgattgcgtgtccatctcggctcgggtcgcggtcaaggtctcgcgcgaattaatccgccgcgggacgaaatcatcatcatatcatgtgcaaagtgcatgacgatcggatcgagatttcaaaagatcgacgaccaaaagagagctcacttttaaacacgtttcgaccgttctcgcgcttcgtttcgaccatcatattacaccgacgacggcagggtggcgagtgaaattacaatcagactacagtttgacgtacggacggacgaatcatgtcaaaacgagagaacaaggcgcaccaacatctcctctcggggggtctctccggtctagcctctgcgatcgccctccaaccgctcgacctgatcaagacgaggttacaacagggtgtagtcgtaaattctgggggactagcaagtgggatcaagggcaaggggaggtgagtcgggtctaggtcgagcgctgatggcatcgataatcagctaaagatctcgtttgcgcatggttcgtatgcgtggtgccctcagggagatcatcccgacggtccggctggtcgtacaggaggaaggctggagaggattgtggaaggggacggtacctacattagcgaggtgcgcatgatcgagctctagctggctctaggaaaccggctgacgaccgacctcttctcgtaccgactcgagcagaaacgtacctggagtggcagtgtacttttacctcttgtccgaaatccgatatggactctcgcacaccgggttcttctcccagtcgccgacaagcgtcatcccatccgtgctcccaccgggtgcgaccatatcaacgtcaatacaggaagcctcacggcacgtaccctcaccatcgccttcctcttcacccgagatcgccgacgcggccggctcgaacacgatcaacgctcgatcatcttcttcgactttgcccaagttgtcgagtcaggggaatatcgtagcaggggcagtagcacggacgagcgtgggatttgtcttgaacccgatcacggtcgtcaagagtcggtacgaggtgagttgctcgggtcctgctcgatttcgttgcgtcgtgctgcttaaaccatatcgactgacacctcgttcacgcacagtctgggctatatcctacagggtcgatagtacgggcatttagggacttgatcgcaacggacggtctgcgggggatgttccgggggttcacagcgacggcagctagggatgcaccgtatgctgggatgtacatggcgttttacgaaaagggcaaggatgttcttggtgagtcgaacggctggcacgttgatttctaaaaggccatctgcatacgacaccgattcgatggactccgttgtgataggtcgaagttcgtggaaatcgggtctgggcttgccaagcgccatgattcacaccgtctcgggaatgtcggcggccatgctagcgacactagcaacgagtccagctgataccatcaaggtaagttgaaaggttcctgctctagatctggaccaccctaacatgcctgcgtcgcggctgtagacgcggatgcaggtactgcctaaagcgaacccaaccattcgggcagcgatgatctcgatattccaggtaagtccaacgaacaacgacccagcttccatcgctgcgtctcctctaacaatgtcgtttgttcccacgttcaggaacgaggtttcagcggattcttcgccgggtcctcattacgcatctcgagaaaggctgcatctagtgcgatcgggtggacggtatatgaaggcctcttgttggcacttcgggacaagcagatcgtctgaggtggcgattgtgagcaacaatcgtcgaaggtgtatgataaggtggacgtctaggacgaacaggcacacagactctgtaccgagagatctgcacgacaactcatcattaataagggacacgatcccacatgacacgtttgactaggaccgactgaactagggacttgatgatcagactcgagtgcctactacgggcagacgcgatgcgtcctatgtgatccctgagagcatcgtttggctcttccaacgataacgcctcctgtctggacgaccgcctatctggctttatttttggggatataccggacatacttataatcacatctcgctaatcatctggctcaatgagggaaccgtatatgccggagggcatctcgtttatatcgacaatctcaccaagcccactaatcatagcttgcctccgtgagggacgcaccagacgggatgttgtcccaagatcattcgttaataccggaatgggttctggagcttacgggataccagtacttgaatattgccgtcccaaaccttgtcgaggtatccgaagagagtccgatcatgttttggaccttggtgaaggttatggacagagctgccatgctccaggctctcgtgatgacccggttcagactcgtcaggtaccaatcagttgagtgaacatcaagtacaaagctcatatacgacgtcctcttgggatgttcagcacggcggtggtcagagttcctattttgatgggagtccaatgcgatcagaatgctgagtagacgttacgatcaatatatcatgggctacagtaacaacagcaatgtttgtgtaaagcgcatgtcctaggttcattagtggcattctcatgaattgagtggaggcatacgtataacaatactcttccatttcggaatgctcttattttgctgtctgacctgacatcatacttggaatcgtcctgaaaactgcagactacagtataagaagcgtttggcagctagatgttgatgggaatgtatggaatttcagtcactgattggctggttccacattgcttactgccgattgtgaggaggatacggtcgaatgaccgagtcatcgaatggccatacggcccgccaatatgaccgaagtcgatgatcgaaacaaccaaggccaatcacaagtcagggcaagggatctagcttgaatgtgtttccatgcgggcaaactcggttcttggtgcaaatgcttgttttgggctcttgacccttgacatggtatcaaatcccaaatactagaagtaccccaacccataccgaaccgatagaaaaccgaaccgatcatcgcaatatggaccaactccctgccgaaatgttgctgcaaggaatggcgatgatgatgaatcggaagttggtactgcatgtggtcagtacgctcttgttcagtgggtcgagtcgaatgctcatatgtcgggcaacgagcccgcgctggtctctatctccaactcgcagcatgagagaaatcctgtgtatccttggaacaccgacactggatcttcaaacaggctggggactcgcagtaggtggtagcatgcggaaagaaggattcgcattcacgtcccagtcgtaagcagtattaaaatttagaaaaggacgatatacggtggcgaccgaaagccatcgcttgacaagaaggtgcgcacaacgacgcactcgttcttcaagaccccgccgtccaggtacaaggaaacatgcagacacgggcgctggcagaacagatatccagacggtcgcaagtagctggagaggattccgaattgtttggcgtggctcaatcacaaagagatggagatgcgtataatacgccgacagagggaaccaacgcctccagagtttggatgaatgtttgaagaatatattcgttattaaagacaactcaacatcaagggagacgtgggagagtggtctaatccgccgtgttaaggtttcaattgaaacaccgcggtccttcggggcgagcgttcgaatcgctccgtcttcacaactttttgcggattttttggtttttgtcctgtcgtatcgtgtcgcggcagcaaatcggatgagcaatcgtcatctgtttgtcgatcagtcgatgagcatcatttatcatccacattctcgattgtgtatgaatgaccacttccagctgtcgacaattccacacctttacactgagaagtcccctgtctgtccagtcgaacaatcacaatgcagctcaccgtcttcgccaacgatggcgatcagacctactaccttgaagtcgatgcctcgatgcatctcgaggatcttctagccttgatcagcgcagaggtgagtcccgctccgttgcaaagaaaaagtctacgacgcccctactgacagttgagatcacagtctggagagagctccgagcaaattaagctgttctacaacggccaacaactggccgatcccaaaaaggatctctcgagctacggtctaacgagcaacgaggaaatcgtccagatggccaggtgtgtacgggaatttagattggaatgtcgcttgccttctcaccttatctgtatttgaagctctagcgcttccactggatcgtcctccacaactaatcaatctttcagcaccgctcccggatcttctggaggtgttgctaacgacatggagcgaatgaggctgaccttgctgggcaatcctgaaatgatggctgagttgaggcgggtgagtgaggggtttggcactcgaacgaggattagcaactcaaaccatttcgatttcaggctaatccgggcatggcacaagcggtcacgtcgtccccagagcaattcgctcgggcgatgcagcagggcatgggtgggaggagcgaagccgagatggaaaagcaacgacagattcaagtcagtaggggtggaaagcccattgtatgctgatactgacgaagcatgctggcagatcctcaattcggatccgtacaacgtagatgcgcagaaaaagattgaagagatgatccggcaggaggccgtgctggaaaatatggagcacgccatggagtactcggtcagcctggaatgaattgtacagcacggcctgcaaaagctgaaaatgacccccatcacagccagaaagcttcggaaatgtgcacatgctttgtaagcagcggcaagtctatctcttgtcgctacctcacgctaatttcggcggtgtggttggcagacatcaatgtcgaagtcaacggtcataaggtcaaggcgtttgttgacagcggtgcacagagtacaatcatttcgtgagcctctttgataccaagaacgatgttccgacattaatacttgatccgagttatcagtccagactgcgcggagcaatgcgggcaagtcggccggaacggattgtgtggaagaactgctcgcttaccctgcacgtcgctaggctgatgcgtttgctagacacgagattcgccggtatggctcgtggagttggaacggccaagattctcggtaggatccactcggctcagattcgtttgggggacttgcatttgccggtcgcattcagcgtgctggaagtgagttcaccgtctttttcatgatcatgttagtcaccgctttgctgataaagttgcgttcacaggggcgagatgtcgacctcttattcggtcttgacatgctgaagcgtcatcaagcgtgcatcgacctggagaaaaacgttctgcgaattcaaggccgagaagtgccattcttggcagagcacgagctgcccaacaaagctagacaaatggaagagctcgcggaagaggttgatcaagccagtgctacggggaacttgcctttggcacccaaggtaccgggacccagtaccgctagcagctccaatacgtttgccggagcaggccaaaagcttggaggtcctggtacctcgagctcacctgcatctggcggtgcgccgtcgaaattcccagaagcgagcatcgtggcggtgagtagcggtaaggatttttgacaccgcgtgcactgttgcttatgactggaatgatccccgacagatcatgaacctaggggtctctcgcgagcaagcaatctctacactcgaagcggcgggtggtaatggtgcgtgcaaacgattcgagggggtattgagtacgggaagaaaacgggctgaattcgcttgcgttccatagtcgacgtggcggcttctctgttgttctagtgcaccactaactgtatcgtaatgagcatcgcatcgtttcggcttgataatcatgttatacaacacgagctccgtgatcaatgtctgcgaatgactggctctgtcgaggccacgttcgccctaccaaggcagtccgccgctctcttcgaccggctcgggcacagcctttccggcagatgcatccaggtcgacgtatgagattttgcctcgtctcgctcgaggatcttccttgaccttgacaggtggttcgcgtggtccggcgtctggacctccagatgcataaccgccgattctgttcaatatgctgccccttgagtgatcatccggtcgataattgtcgggtcttcgtggcggttccctgcttgtcggcaggtactcgggcgagaggtgcggcatacgttgattgaccgaggccggatatgtcaatgtgggcgggagatgttgagggtccagtgcgaagttgttgaacattggatagtccttattgacccgttcctcgtattcagcgaagttggtcaactcctttaatagctccggatgtctagacacgatgtggcgagcgacaaattctgctgccttgaaaggcttgttacagatagtgcagcggctctttttaggatcgtcaacgctgatgtttctctcgatgagttgcttgtattcgggataactgcaaaggggtataagactcagttcgtgttaggttcgcttcaatctcgcacacacaactgactcttgcttctctttcgctccatactcttccaattcgatctcgtctcggggcaggatgatgagcttgatcttgtgatccacattgtccgaccatcgcttttcagcccagacgtcggctctatgatgacgatcgtgagccttgcgcttggcgccaccgcgcccattgccacgataagtcgtctcgacatcttccatgacgatgtccgcacccgcttcctccaagtccaacgcgaggggagtacgcaggtgacgaatacacttgcggtaaagttcctctgcgtaatcggtaggagcgacgcagtagtaacagctatgagattgcgcctttttgcgtaagcgttgttctccggtatcgccctcgatccaggcttacgtgtgcaaggcatttcgaaggtaagataaccagtgatccagctcgatcctcgccttttcacgtgcttccccaaacgtcaagtcatcctctgccttgtcgagccccttttgtccccacagcatcctgatcctctgctcgacgtgcccgctggcggcttcctcgagttgcgtattcacccctgtccttttgagcttgtcgacgttcgatttgtcgtccttcatctcatcgtcctcatcagcgtcttccacgggcgtcgcgaagagatcggcttctagtctcagtgccatggcctttgcttgctgactgtcgtgttgcatcctttccactgtgcaagaaagcgagggagtgtaccgcgctcggccaatgaatggttctccgttcttgaccatgttgagctgaaacccgccgacctgcgtaatattatattaacaattgggttcgccttacgattccaggacagcagtctgcccaccttgaccttatccagcgcagccagggcagaatccatattggcattttgtccaaactggatccatccgacccgcgcatactgtttcttgggcgatggatcactcaaggccaggtactggtatccgcttactctcctgaaagcctatcgacgagatttggctggcgtcagcccccgaatcggacgtggcttgattgacgttacccgcactaacctcttccaacgcggatcgactatgattgctgtgaacagttttgatgaagagctgtttgggaggatgctcgatctcgataacatccggatccgatccctgaggggctcccggtccccagaggttcaacccattgggcagttttttgttctcagtcgtacctgaacccaccgaacgggtcgatacgtcagccagtatgccatctcgatgtagcaaaccagcccgactcacgagaagcttcataattgacttcgtcccaagtcccttcgttcagcgcggtgatatacttgcgcaccggatcggctttgcctctttttgtgttctcgatgcgcatattgacgaaatcccgttcattcgagtatcgatccttgaaccagccttggtccttgtggaccaggtataacgaccacagctgttgcaatctcgattcagcaatcagatgtcaatgccaggaccatgcctcgatctcacctgacgagctttgaagtgatccttgtatttcagataatgcttcgggattccgacaactggctggtcttcaggttttgccaaaggatgttgtgcctcctcctccttggcctatgcgcgaatacacgggttcaacgccgatcatccagcttgtgcaatgcccagttctcgaatgcatgactcacgatatccggtttagcctgccagaaccacctagaccacggatcaaacctccaaaggttctccgtctcctccgggttctgtaacccctgagtctctctcctgggcgggcctcccctcgatggagtcggcgttcgagcttgacgtgcgatatgccattccctgtctctgctcctccccctgtacggttccccacggaatggagggggagaagggggacttccgtaacgtcgtcgtctttcccattctcgatcaggacttctacctccataagggtcgaatcgttcacgatagggaggagggggaggtccacgatcgtacggtcgagctccgggtggagggggaggagagaacctcgatcctcgagcggatcgggtgggagagatgccacggggaggaaaaggaccaggtcggccgtcgtaagggtcgccgtagggaggtccgcccactagatcgtctggcagaggtccatcgagaccacctggtgggggaggaagtctaccaccgttcctatacggagatggcgatcggtatcgacgcggcgaacgggatctgccgtatcgcataggaggagagaaagatcgtggtcgataggcaccaaaggcaggagatcgggaacggtagggagaaggtggtcgcctatcgcctggaggtagaccaccaggttcgtaccgactgtaagagggcgaacgacgtcgtggacggtctacatgatccgtatgtgtggatcagcacacgcacggccgtgtcgatacgttgtgtgcggacgacctaccggtaggaggacctcgtgcataatcgtattctcgacccctcgggcccatctggcctggagggggacctctcccgggtggaccgctatccatctctcctagaatctctgtacccggctgctcgctccaaagttgatcccttgtcctgctcgaggtttctcaggggtttggatgtgagaagtattcctaaagctggagctacgatgtcgtcttttgcgtccaaccaggttcctttccctcggatcgcgtgacgtgctggtcgtctatatcggctacgcctgacaagactatatggatctgcctacaaagttaagtcctgacgagggttcagctcgatgaagtgaactgctgcgaacatgttgatgatggaccatctaccagtagtagagtctctccctctctctctctctctctctctctctctctctcttcccctgcttgcttgcctttgagtgaaagggaccgttcgcgctcacaaagacccgcggtacacgcgtcagaaaagatcggaccatacagaacgtctaaggtaacatcatcatacactcccaacgtgaacgacgacgagccactcagagaaatcatatggtcatcatgtacatcaatcaagggagaacacacggtcacacataacaaggtcgacctctttggcctgtggggtgcgcgggacacgccttgatcgtctaatgcaccatggcgctctcgcctgcattctcgggtgcgctcaacatggccttgccagcagtgttatactgcgtgctgaggatctcggctccttcccagaatctacagacaatgtcgatagagatgagaaccgaggttgtactcgctcggtcaacaaggcaaggcgaacttaccgaggcaattcgtttccggggataaagatcctcctcactccttcctttttgatcacgcacatacgtacacaaccacccgacgatccatctcggctcatagccagcgagagggctggaagtttgatgaatcacatcagtcacacgccaaccttgtgcgattacgctccaagggcgactcactgttcttgacaaacgtgaccgtctcttcctcgttcatcttgtccttgtaagtcgcatcgcagtatccgtagacatacgtggacccagaacctgttcagaccgagtccctaccaaatcaattccgggaacgtctgtgacccccgcgactgcgtcgacgactcacctccgatactccaaggctgcctaaagattccacccccaagcgggacattgtacacttgtccaccctcatgctcgtcccatccagcgacgatgatgccggcgctcaattgatccttgttgtcgtaacatacggtttggaagagggaagcgacggtgtgcacgggcgggcgttcgccgtgggcggtagcgtacatctggctgtggtagtgcaccatgtcggcaatagcctagaggttcggagaagtacagattccgggggtcagatgatgtccctaatgaaaggggcaaatgagaaccgaggccttacctgggtgtcggcggcacttccacttcgacagcagtagacccggtcgtgaatatgagtcaacttgtccgtcactctgttggcctacgcttccgaaggatttcgaggtcgatagatgacacgaggtagatgtcatccaaccacagattacgaaggcaacgagaggttagcgatattcggatagagcaagagccagctgatgagaatgattcgagaacgcacgatgtaagaccccgtcgtcgtcctgctgtcagcaccgatgaccacgccgccatcgaaagcgacagccatgatcgaagtctgcacagaagcgtgagatcgatatgaacgtatcagtgacgggcacgagagaaaggacggccagtcatcactcgaggtcaagtgaactcacaccgaggttgacctcccccttcttcagccgctcaatgtctaccgtgttgattccgtcagccatcttgatcgtataagtgtgcactgatctgactgatctgttatgataatattgtcaaggactgatgctagatagatatttgatcatgcaagcgatctcatagccatgaagcacatacctactctactacgtccaagtcgtaagcgttcgatgcgtagtggatgatgcgagggggcgacgcgtaattagaaagtgagcggaaccgcaaaacacgtcacctatcgctgccgtaaactcggtgcggtcgtcttgaaacgctcaaccatctcgattactttcttcaagctgcaatcgagccaaacagagaggagacactacacgcgcgaaggggatcatacgtgcgcaagggatattgcgggtacatgtaggccttcagatcacatagatcgctcgggtcggggagcgattcctacaatccgccatgccgagcgctctgagtgcgctcgcacggtgttgctccaacgaatcatgaacttgcttttcgcctctctgttcatttctctgccatcagagtagcaggatactaattggttctcgagatctgtgtagacacgcagccggaaatggacgctctaagcgattaggatcatcgatgcattcacgggatgtgaccctcgtgaacggtacacgccacactgttcaccgatccgcgctgcagaggaggctataatatgtagcaagcgagtagaggtataccccggagcgtaattgatagatgaaatctggtattgattttatctgagcggacaagagagacacaaatacatcacctggtgactatgcagacctcgcgcccatgccgttagaaaccgccctgcaccaattcagtgaacttggggtacgaactcttggaggcatcatgcaaatccgatttatttggagcaaaattggtctcgtattcgatcttgcttggaacgtgtctctttggactcggtgagagtggtctttaaagtacaaagcatcataactcaccccgatatgccttccgtctggcattttgctatatctggaatcaggaaggaaaaatattcggcttacaccgtttcgacaggggaatcaatgagagctcatcaaagcaacatcaagaccatccagaatcacatgaggaatatatttgaaatttaatatgcagaggccttgtgctagaatatcgaatcgcagcatcgagggaaaacccttggtaagatgcaaaccaaccttgaaccgactagaaggtcgtcaaccgctaaaaacgtcagccttcgactggatgtatggccttgttgagatgttcatccccttttgactcgctaccgatcagaccccacgtacgatctttcctcaagatctacgtgaccttcaatcgagtccgagccaaattggagcatcattgtcataacaacttattcccatgatcgctcaatcttctcgaccgttttcagcaacagcgcgataacttgcattgcaaggttggtccagaattctctcatcctgactaccttgaacgctgtactgtcgcccggttctgaaaacagagttgtttgtggacccaatgtcgctatcctttctgataatcaaaggcgtcgaagccaagcgccagcttcaacagttcagtgatcaatggaacaaggtcttgatcggattcgtcacttgttcagcactgtacatacaaagggaatggcctggcatcaccaggactacttcaacccccttacgtacggctgcgtcctgaatttgctcatctagttgggcgcgttgatccccttactcgcactcgtcttactcaaatcttcgactctattcgacgcggcgaccgaccttgcttaggagatggttttttcttggttccgaagtgggaaacacttatagcgttgcgttttcgggttcgtactaattgatatcgtctccgatggatatcgaggtatacaaatgagtgatctggtcgtaaaagagaaataaaggtgcaaaatatgcaagtacagcatgaaccccgacaagaccgtattggcttctgccggtcccacatagtccgagaacgtctgtctcagctcctgttcatcggtactgacgctactcccgcttattcgtcgtaatcctcgtcgtcttcgggcgacctgttccccctatccctatcatcatccctcccgccgactctcctctcggttcggtcattctcctcgatatcatcgtcatcatcgacgaccatcccatcatcctcgaactcgtccatatccctgtcgtcgtccgctcctcctttctgggaattatcgtcctcgtcatcgtcgtcctgttcttcttcctgcttcgagtgatcaccggcgacatcatcccggggaatgtatgggactccggaacgcttgatacggttgatgacatcgggaggcggacggccgataactcggacagcatagagacccgggacgtggttgactgcgctcggatagaaaggagtttagatgagatgatcagcgaagaggatcccaaatacaagggcagagaacagggaactgaccatttcgctgccaccgggctacccaggactccttggggtggagtacagcaatgactccatcaaactggaccgatgtgcatgccttgatcgaatcttgcgaacctgccacctgtaattccaatatcaaaacgaattgcggcctttgtgtcagacatggcttgtattcgggctggtccgggaggcgaaaggctcaccctgacaatagcctcacagttgggacatcctcgcaacatccagtcaggactgggctgaacgtaggagcaaacaaggcaggctctgtaccgaggtctggcctttccacctcgggcggaagcgtcctgtttccgtgatcgcaggggcaccggctcgagtggcggagacgacatggccaatgttaatttctagaaagaagttctgctgagaggtgaagcttatcttgtagagcgatgtgggatccagcctgtttaaacaagatgtcctacatgtcgaagggtcaagggctagtgtcggctagcttgcccggtcgatcacggacatactattgtttttttgttgatgtccgagggattgtgacgatgtccgcttctcgctgatgccccagatgtgtggggtcgatcgatcgcaaccgccggcaagtgacctcataccatcaacaacgatgaggatactttcgtcaaagggcaaaaacgtctcggtattgatatcgatctacatcgcttcaacgtatccaggtcattctgacaatgtccaacatggcatcacctcgtgcttctatagcctcagatcgagtgacgaccaacaatcaagccacaccgacgctgccttcaaagtatagagtacctccacttccaccccgaatacatcaacgcatctacctcaaaccggtgcaagacgggctccttctcgggtcaagcgcttccaccagtaataccggtaccggccaagataatgacgtctggataggatacggtcccaagggtcagatcaagcgatggaaggagctcgacccacaacgtaaacaaagaccattcgtcgagacggtcaaagaagaacctatccaaagcctcgaaatcggtggaattttgggtctgacaagattgtgggagacgtcctacctgctcgtcttcctcagtccacctcgttcggcctcgaatacttcgagctcgaacgcaacctcgactggtacgggcacgggttcgggagtgatcaggatcttccctcccgaggtcaagaacgagttccccaaccttcccctcaatacgcccacccgtgtagaggaatccgatccccttattcgaggattaagagcaatcgctgagcgcgaagggctcttgtccccagatggacgcctgaacgcctactctcctcgcgttcaacaggggaatgcggatgaagaagaaggagctgccgatgatgagcagagggacgggcaagggatggtctacgagctgaggaatgtgtatgcaatccccgtgaacagagaaggtgcagaagggattatcaggaatatccacgctgcgaccgcaaaggtgaatcaaggttacctgctgtgtggtgataatcggacggcagctaatttgctcttgctttggctcgatagaacaagcctaaagcggctcaagctccggcgatacctcagacgaaccggactcaggcatcttctaccgactcgatgagctccagtcgagcgtctttcgagccagggccagagactccagctcaagctttggctagggccttgaacccagctcgatggaacttggggatcaacaaaaagaccgatagcactgtagcgatgtctgcttcgaacccgcaacaaggggacaaacccggcaatgagactgtagaatcagataccaagttcatccggtcacaggcgactggtggaaaacaagagcttgctggctccggagacatcggggaaagcatgttccaggaagatgacgacgatcaatccgtacaaaaggccgacaaggcttcgggtgaagctcattacgacgatcaagccggacttcctaaaccggacgatgtcatggccaaggttcccgagaccaggaccaaggaggagaccgcggcttccgcttctgcttctgcctcggccaatcggtctagctttatggacggcctcaaggcggattggaacaagatgttcggggccagaccggctccggctaggtcagaacaaggctcgctggccgagggcgatgacgaagaggagagaagggaggacaaggtcgatgcccaagcgcccgggatcttggatgcagccaaagacaccgaccgtccgatcgaggtggatgacggcgaggtcaagcaggagatggaagagactctacctacgagcacagctacgacagggcagagaaaggacctcgaaatcaagattattagggagatcgtcagaactctaggtggtggtacgtcaccaacgcacccttgaagtagaatagctaaaagtctggtcgctgaccgtgctgaatatcaccgctcgcaggtggattcttctattcgttcgagaccgatctctctcacaatctgcagcacaagcggaagcagctcgatgcccggaaacaaagcaccggcttgctggggtccctcctgcagaagggggatggtgatcgatcgcccttgcctttgggttcggaaccgaccactcccggaggtgatctggccgagtccatgctgagccagtcggctcttggtgacgccgcaccgggacttgaagcgccagcagagatcaaagagaagaaggatcctatcgcgcttgatcaagaacgacaagaacgtggagagacttggatcgagcccgatgtcgggcttcctctttggcgacgggtcgaccagcggttcatgtggaatgcttggatgttgcgggagttcattgacgcgggactccacgaattcattctcccgatcattcagggctgggttcagtcatcccggtttttcatcccgcctgtcgatccttcgcctctaaccaacctcaacgatgccaagagtccggaaaagagagccgagagagatctcggtcctcctagcacaccggtcgatctggtactgatcagtaggaggagtcgtgaccgagccggtctacgattccagcgaaggggaattgacgaagacggtaacgtcgccaactttgtcgagaccgaaatgattatccgggtcaaggtggagggcaaatggtctattttcagctttgtcgagattcgcggttctagtaagtgcgttcgggtcgtaatgggtgggcttttcgatgattactgaccattttgagtgccgctgcatcctcagtcccactgttctggtcgcagagctcgacactgaccgacatgaagcctgcgcccaagcttgaccgaccggtggctcaaaccatcccgaccactcgactgcactttgatcacctcaaacaaaaatatggcccgcaggtaagcggaccagcaggtatcccatatgcaagacaattgtgttaaggctgacggcgatcgcatagaccatcatcaatctggcggagacctccggaaaagaaggggctgtcaccctcggctaccgagatgccgtcaaggagctggaagatgatgacgttcggtacaaagagtttgactttcaccacgaatgtgagtagactcgtttcgtttccgcacgcaggctgtactgatattacttccactgcaggcaaaggaatgaagtacgagaatatctcgaagttgatcacacagctgcaatcgacgttttcagagcaggggtatgtggtttacacgctatgagactagtccgcgcctctgactttgatttccgatcagctacttctggtcttgtcaaggagaggtcatgagggaacagaccggaacgttccgagtcaactgcattgattgcctagaccgtaccaacgtcgtggaatcggccttggccaggcacgtccttacggctcagctcacacaggttggaatgaccccggactcgctgacgtcgaatatcgagtttgtgtacaatgatggtgggtttaggcaaggacgattatcagcgattcaagctaattttaaccgccacaactcagcttgggcgaataacggagaccagatctccaagctgtacgcaggaacaagtgcactcaagggagacttcactcgcacggggaagcgcgatttgcacgggatggcgagtttcgatatagcctgttgtcgtacactaactatcacagctgatgcgcatcgagcatcggcatagatcaatgacggtctcaactcggtcgctcgaatgcgaaggggagcgattgaagacttttacctccaggccgtcatctcgtttatggtgagtgtgcagccatttagtgcttagcactcaattcctggatctgaaaccgatgaatggaaaggtcggcgagcgaaacctgactgtgttcagcgaggtactctcgaatctggcatccaacgatcgtaccaatctcatccggttgtcaaggattcgagctgctgccagtaagccgctaccgtttctcttcagctttcccctcactcagcaagcaattccacatagtcgagacgtgcacagcaagggttctggaagagggagaacacaggataggtggatggaccgtgttctctcctgaagaggccaacaccaagtttacccgcaagcttgaggaaaaggtcttgatcttggtaagttggtatacatcatggtataatggtagcctcagctaatctaccttatctactgtcgtctgatcagactcaccaagcgctgtacaacgtctcgttcgactacaatttggaaaaggtagtgtcgtcgactcgggtgcccttacgtaatattacgtgtctctcaaaaggtaaacagaccaccctctcctagcgtttcaccttgtcgcgacgagaccggctaacagtggcaaatggtattatctatgccgagtaggagcgtacattctgtctgcactggacgaatctggccgcgatcctgccgaggtaagttgtcgcgcaaaaatggcaaaaaagcggattgcgactgaagttgcgttttgtgctgtgatagaatgccggttttgtggtatactataggccctccaagacgggcacgagaatcacaagctattcgatgatcaattcgccggaccctaagggacgtgaaagggcattatcgagcgtgtcttcgcatggtcgaaccggttccgccgagatcgaatttactgggacagcgacaaatacgaacgagtttttcgccttcaaggtcttgcctagggagtttgtcgcggctcatttgtccggatcgcaacatgatgaagacgaagaggaagataggggcaaagatgactcttgcaagatcgttgcggatcgaatggtcaagcggattcgggatgaatgcgtcaaggctacttcaagtgtcgggggttacgtagggggacacgctagggaggagggattcgtaagggacgaagatgttgttgggtgagtaggccagataggacgaacgcctctttgtatgatcatctggctgacagctacgcggattgttagcttggccgaagctcagaaggcgacctcgctagtggcacgggcagactacgcgttgaagcggttcttgtggataccttgatcggatgcaagatgcggatggaaaaaaatgaggtatttgaatctgtcgtgctccgctttaccatggtcgagtgacgtgtaagaccatatcataattctgcaataccaatgggactttcgagtcaatggaatccacgcaagctgggcctggggccgaggcgataggggctcgaactcgaagattcgatggcaatcgcaagagaaagcgcagctttacgaggagcgggcaatgatcaaggaacctcaaggatcgaaatatctgaagcgcgatctaggaccccagtcggatcggatcgaagcctgggacggattgattcgatggcgggcatgacgtgctaggcaggagagatggcaggtagacgtgccttttttcattcgccggattgcaatggccaggtgacgaaatgacgatgcgaggcgttgacctacaattctctcagcttcgtgacgatgaaaaaggcaacggtgattggctccagggcgtgggaccacaggaggatgaatatggggtactcgacgaccggaagctagcttcgtctatcgggaagtttgtcgtcgacgaccgacgaggacgaagtttaagcgagccttttggtgcacattgctgtgtggttcgaggaacacaatggaagcccgagacggagccaattcacgcaccacctcgctccggctgcacgcggtgaacctcgcgctggatacgcggatgacaatatcttgacaaccaagtgcttgtttcacaccgtactagttttgaaacgtccagcaagtggcaaggtatacactaaaagtacttgcgcttttgacggaccatttttggcgaccctagatgcccatcaagagccaaaggaggtttcgaaatttcatgtcggtcggtttcctttcgcgcgtcacgcgtgcgatgaaaccaagtggatcgtcccatcaaatctcatcagatctcatcaaaactcacagaaactccccggtcgtcaagacgaagacacagcattgcccgtcaaaacggttgatcaggtcaagtgaacagctctaagttcaaacgccgtcagtgcattgccaagtacgtcgtcatgactcgatcctcgaattcacgaacgtgggacgggtcgttctttcactctttcctctcctctcgccccctgtcatcgcccccatccagggggaggggaggaagggatggatgcggaagcaaatcatcatcgtcagatcgagcgagggggggacggttgtttccggttgaaggggttgatcgtattaaccggagaccagaccaacctcgaccgggggaggggcgacttcataaagggcgaatcgaaagacatggatcgattcctcacaagatccaacgagtaacatctcaacaaccgaacgtacaaccacaccatacacattcgtattcaaactcattgaaactcgccgagctcgacatcaatttccttgagcgacgacataacccaaatcgcacgcacactgaacatcgcgaacccagaaaacatcatcgacagagctcttagtaccagtcaacatgtctcttcccaaccccaacccttctcccgtaagcactttgatggccgttatgtgacccaaagaatccccccggctgatttcttggaaattgactcctcaaattatagatggagacgatggccaaggtaaggaaacgatcgctgcgtgtcctgtggccccaaattgtcatgctcatctcgacccgtgtcgatcactctgataggaacgagtcaacatccctttcgatatccgcaaggtgagcccgcccccgatactctctcctccaaacatcccccctatgaccacccccgctgacgcaccacacctaccctcccgcgctctcctcgtcctcgtcgtcagctcggagtcatcctccacggctcggaagacaacctcgccctgaaagaaagactcatgctcgagctctcgcgtgacccggtcatgcaactccgagacgtgcatgacctgaccaaggacgaattgagggagaggacgatggagaagattgccgagatgaggcattacgtcaagacggatgatgcaaagacgtttgctaggcgttgtcaggtgggtctgtctgtcactccctttcacccgatcgcgtccggaaatggcgccgatctcgggttattggcaaacatgggctgatcgaatgggcatgtcggatctgtcttgatagacggtcgggttgtcagacgcagggttccagacccgattcggagtgtcgaccgggctctttctcggcgcgatcaggaacggttccaccaaggagcagtggggtgagtggatgactcgtctcgcccgcgttttgaaccttgtcccaatgcaatgacactgacacacacacctatgcgcccgctcagattactgggtgaacaagggtgtcctccagatgcccgagcggatcatcggttgtttcggaatgaccgagcttgagcacggttcaaacgtcgccggactcttgacgaccgccacgctcgacaagaagacagacgagttcatcatccatacccctcatctgggtgcgaccaagtggtggatcggaggtgcggcttcttcggccacgcactgttccgtctttgcccagctcatggtcgatggaaagaggtacggcaccaagacgtttatcgtgcccatccgggaccccaagacgttcaagacgttgcccgggatcttgatcggggatatcggtaaaaagatgggtcgggacggggtcgacaacgggtacctccagttttcttacgtccgggtgccgcgagactacatgatgatgaaatacacccaggtctccaagtcgggcgaggtcaccgatacggcggccccgcagatggcgtacggcgccttgatatcgggtcgagtgggcatggtcaccgattcggccgtcatcgccaaaaagggtctcaccatcgccatccgatacggtatcgtccgacgacagtttagcgccggcaagagtgacgtcgagacccagatcctcgattaccccatccatcaacgtcgtctcatgccgctcatggcccaggcgatcgccatcgggttcgccagcatgacgttgcagaaaaaatacgaggacgtcatggaatcccgagcgcacctcggtccttcccagctcgacccggctaaccacgcggcagagatcaaggagctgcacgtcatgtcggccggtctcaaggcgttcagcacctgggcctgtctcgacatgctcgaaaagtgtcgacagacctgcggtggacacggatactcggcctactcgacgttcccccagttgatcgccgatttcgccattcaatgtacctgggaaggagacaataccgtcctcatgctgcagtccggtcgagcgctcgtctcttacctagaagacgtcaagaagggcaagaacgtccctgccggtgtcgcttacctgaagacggcctcgtcccgcggcaagtcggacggatccctcagcctaaaggacgtcgagcagggctttgaaaaggtcacgagcggggccgtcgaggacgcgtatgccgagtacagttccttcttgaaaaagggtcagaacaaggaacaggccctcgagagttgttccaacttgcgattcgtcgccgctcgattacactcgatcacatgggtacgtctcgggcggttgtctttcctttcttcctgttaagacgtcgtttgctgatccttcttctcatatcgtttcttgttgtagctattcaaaaacttcatctccgcccttgacaacacgcccgccggtcccgagcgcaaggtcctcgggcaggtctgtcgattatacggattgtggcaggtcgagctcgaggccgctcagttcttgagcgccggatactttggcaaggaacacttggccaagatccagaccgaggtgagtcggggtatgagatcaccggcattcacgggagcggccccggctgatcacgctttgactttgcgccccgtcgaaatagatcaacgacttgtgcttggagatgcgcaagtgcgcgatccccttgaccgactcgttcttctttaccgaccacatcctcaacagtcccctcggacgatacgtgagtctctatggcgcggaccggagcggatgatcaattcactacagtatgctcacgtcgcttctcatgcttgataacacaggacggagacgtttacaatgcatactacgacacggtccgacgggcaaaccctcctgttccccacccatactttgagagggtcatcaagcccttgttggaggcccccgctgtggacctcaagggaagactgtagtaaacctttaggacagacaatctcttgtacaagcaaatcaaagggccaacagtaaaccttattgtatactgaacacgatcgatcgatcattttgttgatcatcatggcagagtctgaagctggcgccaacggaatctgggcaggagagttgctgaacacctcttgtcaatttgtcttgtttgtattcaaatacattgttttctacaacgttgtttcggattggacgattctcttgatacatatcggtcacgggtcacgtctagtcatgggtctactgatgaaggatcgaggtcggctgtttggcagcctctttagccttcctcgcagtgtccttgtgaactacagacgaaagagaccttcgcgtcagtacgtggcgagaatggggccgagcgatcgacttcgactagcgactcgtggcacccggacttactcttctggagctgcttcttccatccgaaacaggtggaacagtgatccgaagaatgtttcttgcattggatggatccgtccttggcgttcctggtgtaactaggtacactcaagggtcgtcgctcgatcgggtccaactgttggaatgcaaagggtagtcgatgagctatattaatatggtcaggggcagacaagcagggcaaggcttacgccgaagaaggaatcgttctctatagaacggtggggacagtcagcgccgatctagacatctggttggaccagtcatcttaccctctctggcatcaaaggcacaggcctcgcagacctcctttccatgctcgcagaagatggcgtcgttaatatccaaagaagaagtggaactgtttacatacagaagaggttgttgtttagaacaagagagagggagggaaagccggagcggcaactggcgtactcagcgggagagacaccgagttcaacagaagacatcgttaatgaagtttcaagtttgagtgatcgtaaaatgggaaagggttggcagtatttgctatcgtcggtcggcctgaagaggacttcctagttgcagagaggggaaaggacgggcgagcgagagtgttcgagtacatcgtgacggctccccttgtatatgtactccggcgaatggcagggacatcagtcaagtgaccagaagatcaattagttcaccgcttgtgtcacgagacagtgggtcgtggtcgagccagggaggcaaaaccgaggtggtcagctgcaacacgacatagcgcgcggagtcaaagcctgggaacaacacgacgatcgcgcttttgctcgtttccactcttgtctcaaaggttagccgttcagcttgacgagtttgttttgggaagtcaagcaatagtgtcgcatgtcggggtggtcttcctggagatacctttgcccacaaccgcccatgaacgtgattttgctcgccaatcccgcctcgtttcaggtcaggtgctattcgcttcaaggtcgcgtgatagggggggggtgagcctgacaactatttctgagcccatacaagctgccttgtttctcacgaatgtcaggcaaattgcatcacccaccattctcgagcctctcgaggtcctgctttttccccgcacaaggtgaatgacgaacctgtcttcgggccaacttgcagacctcgacttgcagctcgacctagtctcggcatcataaacttcccttgcttgtcggccgaacggacagaagagacctctagcatatcaatagaaaaagacagccttcaggatctgccaaaatgtctacgactgtcgcgaagatcagtgccatccaggatgagatggcaaaaacccaaaagaacaaggccacttcataccatttgggtcaattgaaaggtgcgatcatccagccgagagaataaccatgccagacgcggttgctcacacgtcggcctggtcacttcgcagccaagctcgctaagctccgtcgagagttgatcgagccaaagtcgagcggtggtggtcccggtatcggtttcgacgtcgccaagactggtgtggcgagtgttggattcgtgggattcccttcagtaggaaagagtaccttgatgtaagcatgatccgtgccgaagggatcgagcctttacaaaccagagctgaccgagacctgacctttctgctacataggtccaagctgacgtacgtagatggctgtcttcgagcggtacgaccttgtactgactgcaaactcgtgcttgttaatcgaccgcagaggaaccgagagtgaagctgccgcctacgagttcacgacattgactaccgtacctggaagcttgaagatgaacggagcagccattcagatcctcgatcttcgtaagtatccttcacatgacccgatgcgttggcgtgtaaaccgctaattctgcttgtttgtttgtttgtttgtttgtttgtttgtttgtttgtttgtttgtttgtttgtttgtttgtttgtttgtttgtttgtttgtttgtgtagccggaattattgagggagccaaggacggaaagggtcgtggtcgacaggtcatcgccggtgagtttaggcatcgccaagatcgcatactcagtgattgaccctctgtactacgcttcatacaatctcagtcgccaggacgtgcaacctgatcttcatcgtgcttgatgtattgaaacccctgaacgatttgaaggtcttgaccaacgaattggagggtgtcgggatcaggttgaacaagaagccccctaacatcaccatcaaacagcgagagcgaggaggagtaagtcggcttgcttcgattgtctgaccagaccacaattcagctcgttgacaattctgtctcatcgcttcagctttcggttacccacactgtccctctgaccaacatcgaccaggatgaaatccgtgccgtctgctcagaataccgattgaccagcgcgaccatctcgattcacgagcccgactgtactatcgaccaggtcttggatgtcctggaaggaaaccgtgtctacattccggccgtttttgtcctgaacaagatcgatgccatctcgatcgaaggtgagttctagcagcgatcagcaacaactcggcgagttggaccgtattgacggctcgatggtcatgtagagctcgacctcctctataagattccccactcggtacctatcagttcgaagcagtggttgaacattgaagagcttttggaagtcatgtgggacaagctggccttggttcgagtgtgagcgtcttgcaaggaaagccgcctttcttagaaatctctcgctgagcgttatctatcaaatttagctacacgaaacccaagggtaaggcacccgactataccgagccggttgtactacggacaggaaagtcgaccgttggaaactttgccgagtgagtctgtcaagcacgcaagccggatcgacgtgatcactgattcctattccatatgctctcgtttcgatctacagcgccattcactcgaccattagggaagactt
